(19) United States
(12) Patent Application Publication
(10) Pub. No.: US 2023/0145766 A1
(43) Pub. Date: May 11, 2023

(54) INTERLEUKIN-2 MUTANT AND USE THEREOF

(71) Applicant: INNOVENT BIOLOGICS (SUZHOU) CO., LTD., Suzhou, Jiangsu (CN)

(72) Inventors: Kaijie HE, Suzhou, Jiangsu (CN); Fenggen FU, Suzhou, Jiangsu (CN); Shuaixiang ZHOU, Suzhou, Jiangsu (CN); Weiwei WU, Suzhou, Jiangsu (CN)

(21) Appl. No.: 17/911,893

(22) PCT Filed: Mar. 19, 2021
(86) PCT No.: PCT/CN2021/081840

§ 371 Date: Sep. 15, 2022

(30) Foreign Application Priority Data
Mar. 19, 2020 (CN) 202010197740.4
Mar. 11, 2021 (CN) 202110266549.5

(51) Int. Cl. C07K 14/55; C07K 14/54; A61K 47/68; A61P 37/06

(52) U.S. Cl. CPC C07K 14/55; C07K 14/5443; A61K 47/6813; A61P 37/06; C07K 2319/00; C07K 2319/30

(57) ABSTRACT

The present invention relates to a novel interleukin-2 (IL-2) mutant protein. The present invention also provides a fusion protein, a dimeric molecule and an immunoconjugate comprising the IL-2 mutant protein, as well as a nucleic acid encoding same, a vector and a host cell comprising the nucleic acid, a pharmaceutical composition comprising same and therapeutic use. The present invention further provides a method for preparing the IL-2 mutant protein, the fusion protein, the dimeric molecule and the immunoconjugate.

### TECHNICAL FIELD

[0001] The present invention relates to a novel interleukin-2 (IL-2) mutant protein and use thereof. In particular, the present invention relates to an IL-2 mutant protein that has improved properties, such as an improved binding property to an IL-2 receptor and improved druggability, compared to a wild-type IL-2. The present invention further provides a fusion protein, a dimer and an immunoconjugate comprising the IL-2 mutant protein, a nucleic acid encoding the IL-2 mutant protein, the dimer and the immunoconjugate, and a vector and a host cell comprising the nucleic acid. The present invention further provides a method for preparing the IL-2 mutant protein, the fusion protein, the dimer and the immunoconjugate, a pharmaceutical composition comprising same, and therapeutic use.

### BACKGROUND

[0002] Interleukin-2 (IL-2), also known as T-cell growth factor (TCGF), is a multifunctional cytokine produced mainly by activated T cells, particularly by CD4⁺ T helper cells. In eukaryotic cells, human IL-2 (UniProt: P60568) is synthesized as a precursor polypeptide of 153 amino acids, and mature secretory IL-2 is produced after removal of 20 N-terminus amino acids. The sequences of IL-2 from other species have also been disclosed. See NCBI Ref Seq No. NP032392 (mice), NP446288 (rats) or NP517425 (chimpanzees).

[0003] Interleukin-2 has 4 antiparallel and amphipathic α helices, which form a quaternary structure essential for its function (Smith, Science 240,1169-76 (1988); Bazan, Science 257,410-413 (1992)). In most cases, IL-2 acts through three different receptors: interleukin-2 receptor α (IL-2Rα; CD25), interleukin-2 receptor β (IL-2Rβ; CD122), and interleukin-2 receptor γ (IL-2Rγ; CD132). IL-2Rβ and IL-2Rγ are critical for IL-2 signaling, while IL-2Rα (CD25) is not essential for signaling but can enable IL-2 to bind to a receptor with high affinity (Krieg et al., Proc Natl Acad Sci 107,11906-11 (2010)). The trimeric receptor (IL-2αβγ) formed by the combination of IL-2Rα, IL-2Rβ, and IL-2Rγ is an IL-2 high-affinity receptor (with a K_{D} of about 10 pM), the dimeric receptor (IL-2βγ) consisting of IL-2Rβ and IL-2Rγ is an intermediate affinity receptor (with a K_{D} of about 1 nM), and the IL-2 receptor formed solely by subunit α is a low affinity receptor.

[0004] Immune cells express dimeric or trimeric IL-2 receptors. The dimeric receptor is expressed on cytotoxic CD8⁺ T cells and natural killer (NK) cells, whereas the trimeric receptor is expressed predominantly on activated lymphocytes and CD4⁺ CD25⁺ FoxP3⁺ suppressive regulatory T cells (Treg) (Byman, O. and Sprent. J. Nat. Rev. Immunol. 12, 180-190 (2012)). Effector T cells and NK cells in a resting state are relatively insensitive to IL-2 because they do not have CD25 on the cell surface. However, Treg cells consistently express the highest level of CD25 in vivo, and therefore normally IL-2 would preferentially stimulate Treg cell proliferation.

[0005] IL-2 mediates multiple actions in an immune response by binding to IL-2 receptors on different cells. In one aspect, IL-2 has an stimulatory effect on the immune system, stimulating the proliferation and differentiation of T cells and natural killer (NK) cells. Therefore, IL-2 has been approved as an immunotherapeutic agent for the treatment of cancer and chronic viral infections. In another aspect, IL-2 also contributes to the maintenance of immunosuppressive CD4⁺ CD25⁺ regulatory T cells (i.e., Treg cells) (Fontenot et al., Nature Immunol 6,1142-51 (2005); D'Cruz and Klein, Nature Immunol 6,1152-59 (2005); Maloy and Powrie, Nature Immunol 6,1171-72 (2005)), causing immunosuppression due to activated Treg cells in patients.

[0006] In addition, from years of clinical practical experience, it has been found that although high doses of IL-2 can provide significant clinical efficacy in the treatment of cancer such as melanoma and kidney cancer, they can also cause drug-related serious toxic side effects including cardiovascular toxicities such as vascular leak syndrome and hypotension. Studies have shown that these toxicities most likely result from the over-activation of lymphocytes (especially T cells and NK cells) by IL-2, which stimulates the release of inflammatory factors. For example, this can cause vascular endothelial cells to contract, increasing intercellular gaps, causing the extravasation of tissue fluid and thus causing the vascular leak side effect.

[0007] Another limiting problem with the clinical use of IL-2 is that it is difficult to administer due to its extremely short half-life. As an IL-2 molecule weighs only 15 kDa, it will be eliminated primarily by glomerular filtration, having a half-life of only about 1 hour in the human body. In order to achieve a sufficiently high exposure in the human body, a large dose of IL-2 is clinically required to be infused every 8 hours. However, frequent dosing places a heavy burden on patients, and more importantly, infusion of large doses of IL-2 can cause high peak plasma concentrations (Cₘₐₓ), which is probably another critical factor contributing to drug toxicity. Rodrigo Vazquez-Lombardi et al. (Nature Communications, 8:15373, DOI: 10.1038/ncomms15373) have proposed preparing an interleukin-2-Fc fusion to improve the pharmacodynamic properties of interleukins. However, the expression yield of the fusion protein is low, and it easily forms aggregates.

[0008] In the production of IL-2, native IL-2 molecules are very hard to express in mammalian cells (CHO or HEK293) due to the characteristics of its amino acid sequence, and the stability of the molecules is poor. Therefore, Proleukin, the currently approved IL-2 molecule on the market, is produced in prokaryotic bacterial expression systems. However, IL2-Fc fusion proteins cannot be expressed in bacterial systems. Therefore, there is a need in the art to improve the expression of IL-2 molecules and IL-2-Fc molecules in mammalian cells.

[0009] Several schemes for engineering IL-2 molecules have been proposed in the art. For example, Helen R. Mott et al. disclosed a mutant protein of human IL-2, F42A, which has an eliminated ability to bind to IL-2Rα. Rodrigo Vazquez-Lombardi et al. (Nature Communications, 8:15373, DOI: 10.1038/ncomms15373) have also proposed a triple mutant human IL-2 mutant protein IL-2^{3X} with an eliminated ability to bind to IL-2Rα, which has residue mutations R38D+K43E+E61R at amino acid residue positions 38, 43 and 61, respectively. CN1309705A discloses mutations at positions D20, N88 and Q126 that result in reduced binding of IL-2 to IL-2Rβγ. These mutant proteins are still deficient in their pharmacokinetic and/or pharmacodynamic properties and also confronted with low expression yields and/or poor molecular stability when expressed in mammalian cells.

[0010] In view of the above-mentioned problems associated with IL-2 immunotherapy and production, there remains a need in the art to further develop new IL-2 molecules with improved properties, particularly IL-2 molecules that are advantageous to production and purification and have improved pharmacokinetic and pharmacodynamic properties.

### BRIEF SUMMARY

[0011] The present invention satisfies the above needs by providing a long-acting IL-2 mutant protein molecule with improved druggability and/or an improved IL-2 receptor binding property.

[0012] Thus, in one aspect, the present invention provides a novel IL-2 mutant protein. In some embodiments, the IL-2 mutant protein disclosed herein has one or more of the following properties, preferably at least properties (i) and (ii):

[0013] (i) improved druggability, particularly improved expression yield and/or purification performance when expressed in mammalian cells;

[0014] (ii) weakened binding to IL-2Rβγ; and

[0015] (iii) reduced or eliminated binding to IL-2Rα.

[0016] In some embodiments, the IL-2 mutant protein disclosed herein has properties (i) and (ii) and maintains binding to IL-2Rα relative to the wild-type IL-2 protein. In other embodiments, the IL-2 mutant protein disclosed herein has properties (i) to (iii).

[0017] In some embodiments, the present invention provides an IL-2 mutant protein comprising an IL-2Rβγ binding interface mutation and further comprising an IL-2Rα binding interface mutation and/or a shortened B′C′ loop region. In some preferred embodiments, the present invention provides an IL-2 mutant protein comprising an IL-2Rβγ binding interface mutation and a shortened B′C′ loop region but not comprising an IL-2Rα binding interface mutation.

[0018] In addition, the present invention provides a fusion protein, a dimer protein and an immunoconjugate comprising the IL-2 mutant protein, a pharmaceutical composition, and a combination product; a nucleic acid encoding same, and a vector and a host cell comprising the nucleic acid; and a method for producing the IL-2 mutant protein, the fusion protein, the dimer protein and the immunoconjugate disclosed herein.

[0019] Furthermore, the present invention further provides a method for treating diseases, and a method and use for stimulating the immune system in a subject using the IL-2 mutant protein, the fusion protein, the dimer protein and the immunoconjugate disclosed herein.

[0020] The present invention is further illustrated in the following drawings and specific embodiments. However, these drawings and specific embodiments should not be construed as limiting the scope of the present invention, and modifications easily conceived by those skilled in the art will be included in the spirit of the present invention and the protection scope of the appended claims.

### BRIEF DESCRIPTION OF THE DRAWINGS

[0021] FIG. 1 shows the crystal structure of a complex of IL-2 and IL-2Rα (PDB: 1Z92).

[0022] FIG. 2 shows (A) the crystal structure of IL-2 (PBD: 2ERJ) and (B) the B′C′ loop structure superpose of human IL-2 and human IL-15.

[0023] FIG. 3 shows IL-2 mutant proteins screened from the mutant library IBYDL029 and sequences thereof.

[0024] FIG. 4 shows the crystal structures of IL-2 and IL-2Rβγ (PBD: 2ERJ) and a contact interface thereof.

[0025] FIG. 5 shows molecular formats of an IL-2-Fc dimer protein.

[0026] FIG. 6 shows the structures of some exemplary IL-2 weakened molecules of the present invention.

[0027] FIG. 7 shows signal curves of activation of p-STAT5 by selected and constructed IL-2^{mutant}-Fc dimer proteins on (A-E) non-activated normal T lymphocytes CD4⁺ T cells and CD8⁺ T cells, as well as on (F) activated T lymphocytes CD4⁺ CD25⁺ T cells.

[0028] FIG. 8 shows signal curves of activation of p-STAT5 by weakened IL-2^{mutant}-Fc dimer proteins on different lymphocyte subpopulations, relative to a control rhIL-2 protein.

[0029] FIG. 9 shows the effects of IL-2-Fc dimer proteins constructed from weakened IL-2^{mutant} molecules with reduced binding affinity for CD25, when administered in tumor-bearing C57 mice, on (A) the tumor volume; and (B and C) the body weight and changes in the body weight of the animals.

[0030] FIG. 10 shows the effects of IL-2-Fc dimer proteins constructed from weakened IL-2^{mutant} molecules that maintain binding affinity for CD25, when administered in tumor-bearing C57 mice, on (A) the tumor volume; and (B and C) the body weight and changes in the body weight of the animals.

[0031] FIG. 11 shows (A and B) the measurement results of the body weight and changes in the body weight of mice and (C-F) the results of Treg, NK, CD4⁺ and CD8⁺ T cell assays in blood, before and on days 3 and 7 after the administration of IL-2^{mutant}-Fc dimer proteins.

[0032] FIG. 12 shows the amino acid sequence of the wild-type IL-2 protein IL-2^{WT} (SEQ ID NO: 1) and the numbering of amino acid residues thereof, and shows the sequence alignment with the mutant protein IL-2^{3X}.

### DETAILED DESCRIPTION

[0033] Unless defined otherwise, all technical and scientific terms used herein have the same meaning as commonly understood by those of ordinary skill in the art. For the purposes of the present invention, the following terms are defined below.

[0034] The term “about” used in combination with a numerical value is intended to encompass the numerical values in a range from a lower limit less than the specified numerical value by 5% to an upper limit greater than the specified numerical value by 5%.

[0035] The term “and/or” should be understood to refer to any one of the options or any two or more of the options.

[0036] As used herein, the term “comprise” or “include” is intended to include the described elements, integers or steps, but not to exclude any other elements, integers or steps. As used herein, the term “comprise” or “include”, unless indicated otherwise, also encompasses the situation where the entirety consists of the described elements, integers or steps. For example, when an IL-2 mutant protein “comprising” or “including” a mutation or a combination of mutations is mentioned, it is also intended to encompass IL-2 mutant proteins having the mutation or combination of mutations only.

[0037] As used herein, wild-type “interleukin-2” or “IL-2” refers to a parent IL-2 protein, preferably a naturally-occurring IL-2 protein, e.g., a native IL-2 protein derived from a human, mouse, rat, or non-human primate, serving as a template to which a mutation or a combination of mutations disclosed herein is introduced, including both unprocessed (e.g., without the removal of the signal peptide) and processed (e.g., with the removal of the signal peptide) forms. A full-length native human IL-2 sequence comprising a signal peptide is set forth in SEQ ID NO: 2 and the sequence of its mature protein is set forth in SEQ ID NO: 3. In addition, this term also includes naturally-occurring allelic and splice variants, isotypes, homologs, and species homologs of IL-2. This term also includes variants of native IL-2, which may, for example, have at least 95%-99% or more identity to the native IL-2 or have no more than 1-10 or 1-5 amino acid mutations (e.g., conservative substitutions) and preferably have substantially the same binding affinity for IL-2Rα and/or IL2Rβγ as the native IL-2 protein. Therefore, in some embodiments, compared to the native IL-2 protein, the wild-type IL-2 protein may comprise amino acid mutations that do not affect its binding to the IL-2 receptor. For example, a native human IL-2 protein (UniProt: P60568) with a mutation C125S introduced at position 125 is a wild-type IL-2 protein disclosed herein. An example of a wild-type human IL-2 protein comprising the C125S mutation is set forth in SEQ ID NO: 1. In some embodiments, the wild-type IL-2 sequence may have at least more than 85% or 95%, or even at least 96%, 97%, 98%, or 99% amino acid sequence identity to the amino acid sequence set forth in SEQ ID NO: 1, 2, or 3.

[0038] As used herein, the amino acid mutation may be an amino acid substitution, deletion, insertion, and addition. Any combination of substitution, deletion, insertion and addition may be made to obtain a final mutant protein construct with the desired properties, such as reduced binding affinity for IL-2Rα and/or improved druggability and/or weakened IL-2Rβγ. Amino acid deletions and insertions include amino- and/or carboxyl-terminal deletions and insertions of a polypeptide sequence, as well as deletions and insertions within the polypeptide sequence. For example, an alanine residue can be deleted at position 1 of a full-length human IL-2, or one or more amino acids can be deleted from a B′C′ loop region to shorten the length of the loop region. In some embodiments, the preferred amino acid mutations are amino acid substitutions, e.g., the combination of single amino acid substitutions or the replacement of segments of an amino acid sequence. For example, the entirety or a part of the B′C′ loop region sequence of the wild-type IL-2 can be replaced with a different sequence, preferably to obtain a shortened B′C′ loop region sequence.

[0039] In the present invention, when the amino acid position in the IL-2 protein or IL-2 sequence segments is mentioned, it is determined by referring to the amino acid sequence of the wild-type human IL-2 protein (also referred to as IL-2^{WT}) set forth in SEQ ID NO: 1 (as shown in FIG. 8). The corresponding amino acid position in other IL-2 proteins or polypeptides (including full-length sequences or truncated fragments) can be identified by amino acid sequence alignment with SEQ ID NO: 1. Therefore, in the present invention, unless otherwise stated, an amino acid position in an IL-2 protein or polypeptide is an amino acid position numbered according to SEQ ID NO: 1. For example, when “F42” is mentioned, it refers to a phenylalanine residue F at position 42 of SEQ ID NO: 1, or an amino acid residue at corresponding positions in other IL-2 polypeptide sequences by alignment. To perform a sequence alignment for determining an amino acid position, Basic Local Alignment Search Tool available at https://blast.ncbi.nlm.nih.gov/Blast.cgi can be used with default parameters.

[0040] When an IL-2 mutant protein is mentioned herein, a single amino acid substitution is described as [original amino acid residue/position/amino acid residue for substitution]. For example, the substitution of lysine at position 35 with glutamate can be indicated as K35E. When there are multiple optional amino acid substitutions (e.g., D and E) at a given position (e.g., K35), the amino acid substitutions can be indicated as K35D/E. Correspondingly, single amino acid substitutions can be linked together by “+” or “−” to indicate a combinatorial mutation at multiple given positions. For example, the combinatorial mutation of positions K35E, T37E, R38E and F42A can be indicated as K35E+T37E+R38E+F42A or K35E−T37E−R38E−F42A.

[0041] As used herein, the “percent sequence identity” can be determined by comparing two optimally aligned sequences over a comparison window. Preferably, the sequence identity is determined over the full length of a reference sequence (e.g., SEQ ID NO: 1). Methods of sequence alignment for comparison are well known in the art. Algorithms suitable for determining the percent sequence identity include, for example, BLAST and BLAST 2.0 algorithms (see Altschul et al., Nuc. Acids Res. 25: 3389-402, 1977 and Altschul et al., J. mol. Biol. 215: 403-10, 1990). Software for performing BLAST analysis is publicly available from the National Center for Biotechnology Information. For the purpose of the present application, the percent identity can be determined by using Basic Local Alignment Search Tool available at https://blast.ncbi.nlm.nih.gov/Blast.cgi with default parameters.

[0042] As used herein, the term “conservative substitution” means an amino acid substitution that does not adversely affect or alter the biological function of a protein/polypeptide comprising an amino acid sequence. For example, a conservative substitution may be introduced by standard techniques known in the art, such as site-directed mutagenesis and PCR-mediated mutagenesis. A typical conservative amino acid substitution involves a substitution of an amino acid by another amino acid having similar chemical properties (e.g., charge or hydrophobicity). Conservative replacement tables of functionally similar amino acids are well known in the art. In the present invention, residues for conservative substitutions are from the conservative substitution table X below, particularly from the preferred residues for conservative amino acid substitutions in Table X.

TABLE X

| | | Preferred conservative |
|---|---|---|
| Original residues | Exemplary substitution | amino acid substitution |
| Ala (A) | Val; Leu; Ile | Val |
| Arg (R) | Lys; Gln; Asn | Lys |
| Asn (N) | Gln; His; Asp; Lys; Arg | Gln |
| Asp (D) | Glu; Asn | Glu |
| Cys (C) | Ser; Ala | Ser |
| Gln (Q) | Asn; Glu | Asn |
| Glu (E) | Asp; Gln | Asp |
| Gly (G) | Ala | Ala |
| His (H) | Asn; Gln; Lys; Arg | Arg |
| Ile (I) | Leu; Val; Met; Ala; Phe; Nle | Leu |
| Leu (L) | Nle; Ile; Val; Met; Ala; Phe | Ile |
| Lys (K) | Arg; Gln; Asn | Arg |
| Met (M) | Leu; Phe; Ile | Leu |
| Phe (F) | Trp; Leu; Val; Ile; Ala; Tyr | Tyr |
| Pro (P) | Ala | Ala |
| Ser (S) | Thr | Thr |
| Thr (T) | Val; Ser | Ser |
| Trp (W) | Tyr; Phe | Tyr |
| Tyr (Y) | Trp; Phe; Thr; Ser | Phe |
| Val (V) | Ile; Leu; Met; Phe; Ala; Nle | Leu |

[0043] For example, relative to one of SEQ ID NOs: 1-3, the wild-type IL-2 protein may have conservative amino acid substitutions, or only have conservative amino acid substitutions; and in one preferred embodiment, the conservative substitutions involve no more than 10 amino acid residues, e.g., 1, 2, 3, 4, 5, 6, 7, 8, 9 or 10 residues.

[0044] As another example, relative to the IL-2 mutant protein sequences specifically given herein (e.g., any one of SEQ ID NOs: 37-638), the IL-2 mutant protein disclosed herein may have conservative amino acid substitutions, or only have conservative amino acid substitutions; and in one preferred embodiment, the conservative substitutions involve no more than 10 amino acid residues, e.g., 1, 2, 3, 4, 5, 6, 7, 8, 9 or 10 residues.

[0045] “Affinity” or “binding affinity” refers to the inherent binding ability that reflects the interaction between members of a binding pair. The affinity of a molecule X for its binding partner Y can be represented by an equilibrium dissociation constant (K_{D}), which is the ratio of a dissociation rate constant (k_{dis}) to an association rate constant (kₒₙ). The binding affinity can be measured by common methods known in the art. One particular method for measuring the affinity is the ForteBio affinity assay technique described herein.

[0046] As used herein, an antigen-binding molecule is a polypeptide molecule that can specifically bind to an antigen, e.g., an immunoglobulin molecule, an antibody, or an antibody fragment (e.g., an Fab fragment and an scFv fragment).

[0047] As used herein, an antibody Fc fragment refers to a C-terminus region of an immunoglobulin heavy chain that contains at least a portion of the constant region, and may include Fc fragments of native sequences and variant Fc fragments. Fc fragments of native sequences include various naturally-occurring Fc sequences of immunoglobulins, such as various Ig subclasses or the Fc regions of allotypes thereof (Gestur Vidarsson et al., IgG subclasses and allotypes: from structure to effector functions, 20 Oct. 2014, doi: 10.3389/fimmu.2014.00520.). In one embodiment, the heavy chain Fc fragment of human IgG extends from Cys226 or Pro230 of the heavy chain to the carboxy-terminus. In another embodiment, the C-terminal lysine (Lys447) of the Fc fragment may or may not be present. In other embodiments, the Fc fragment is a variant Fc fragment comprising a mutation, for example, a L234A-L235A mutation. Unless otherwise indicated herein, amino acid residues in the Fc fragment are numbered according to the EU numbering system, also called the EU index, as described in Kabat, E. A. et al., Sequences of Proteins of Immunological Interest, 5th edition, Public Health Service, National Institutes of Health, Bethesda, Md. (1991), NIH Publication 91-3242. In some embodiments, the antibody Fc fragment may bear an IgG1 hinge sequence or a part of the IgG1 hinge sequence at the N-terminus, e.g., the sequence of E216 to T225 or the sequence of D221 to T225 according to the EU numbering. Mutations may be comprised in the hinge sequence.

[0048] The IL-2 protein is a member of the short chain type I cytokine family with four α-helical bundles (A, B, C, and D). As used herein, the terms “B′C′ loop”, “B′C′ loop region” and “B′C′ loop sequence” are used interchangeably, referring to a linker sequence between the B and C helices of the IL-2 protein. The B′C′ loop sequence of an IL-2 protein can be determined by performing analysis of the IL-2 crystal structure (e.g., PDB: 2ERJ). For the purpose of the present invention, according to the numbering of SEQ ID NO: 1, the B′C′ loop sequence refers to a sequence linking the residue at position 72 to the residue at position 84 in the IL-2 polypeptide. In the wild-type IL-2 proteins set forth in SEQ ID NOs: 1, 2 and 3, the linker sequence comprises 11 amino acids, namely A73-R83. Accordingly, as used herein, the term “shortened loop region” or “shortened B′C′ loop region” means that a mutant protein has a B′C′ loop sequence with a reduced length relative to the wild-type IL-2 protein, i.e., the linker sequence between the amino acid residues aa72 and aa84 is shortened according to the numbering of SEQ ID NO: 1. A “shortened loop region” can be achieved by replacement or truncation of the loop sequence. The replacement or truncation may occur in any region or portion of the B′C′ loop sequence. For example, the replacement or truncation may be the replacement of the sequence A73-R83 in the loop region or the truncation of the sequence by one or more amino acid residues at the C-terminus. As another example, the replacement or truncation may be the replacement of the sequence Q74-R83 in the loop region or the truncation of the sequence by one or more amino acid residues at the C-terminus. After the replacement or truncation, if necessary, a single amino acid substitution, e.g., an amino acid substitution for eliminating glycosylation and/or a reverse mutation, can be further introduced into the loop region sequence to further improve the performance of the mutant protein, e.g., the druggability. Therefore, herein, the mutated shortened B′C′ loop region can be described through a sequence linking the residue at position 72 to the residue at position 84 after a mutation is introduced.

[0049] As used herein, an “IL-2Rα binding interface” mutation refers to a mutation occurred at amino acid sites where IL-2 interacts with IL-2Rα (i.e., CD25). These interaction sites can be determined by analyzing the crystal structure of the complex of IL-2 and its receptor (e.g., PDB: 1Z92). In some embodiments, the mutation refers particularly to mutations in the region of amino acid residues 35-72 of IL-2, particularly to mutations at the following amino acid sites: 35, 37, 38, 41, 42, 43, 45, 61, 62, 68 and 72. Preferably, an IL-2 protein comprising the mutation has reduced or eliminated binding to IL-2Rα compared to the corresponding protein before introduction of the mutation.

[0050] As used herein, an “IL-2βγ binding interface” mutation refers to a mutation occurred at amino acid sites where IL-2 interacts with IL-2Rβγ (i.e., CD122 and CD132). These interaction amino acid sites can be determined by analyzing the crystal structure of the complex of IL-2 and its receptor (e.g., PDB: 2ERJ). In some embodiments, the mutation refers particularly to mutations in the regions of amino acid residues 12-20, 84-95 and 126 of IL-2, particularly to mutations at the following amino acid sites: 12, 15, 16, 19, 20, 84, 87, 88, 91, 92, 95 and 126. Preferably, an IL-2 protein comprising the mutation has weakened binding to IL-2Rβγ compared to the corresponding protein before introduction of the mutation.

[0051] As used herein, with respect to binding to an IL-2Rβγ receptor, a “weakened” IL-2 protein molecule means introducing a mutation into a binding interface to IL-2Rβγ that leads to reduced binding affinity for the IL-2Rβγ receptor relative to the corresponding IL-2 protein before the introduction of the mutation. Further preferably, the weakened molecule has reduced activation activity for T cells (e.g., CD25⁻ T cells or CD25⁺ T cells) and/or NK cells relative to the corresponding protein. For example by measuring the ratio of EC₅₀ values of activation of pSTAT5 signals in T cells by the weakened molecule and the corresponding protein, the activation activity may be reduced by 5 times or more, e.g., 10 times or more, or 50 times or more, or 100 times or more, or even 1000 times or more. For example, the activation activity of the weakened molecule for T cells can be reduced by 10-50 times, or 50-100 times, or 100-1000 times, or more, relative to the corresponding protein. Thus, in the present invention, in some embodiments, the weakened molecule of the present invention has “weakened” binding affinity for the IL-2Rβγ receptor and “weakened” activation activity for T cells.

[0052] All aspects of the present invention are further detailed in the following sections.

[0053] 1. IL-2 Mutant Protein Disclosed Herein

[0054] Advantageous Biological Properties of the IL-2 Mutant Protein Disclosed Herein

[0055] The inventors have found through long-term research that the following molecular mutations and engineering can be combined and implemented to improve the efficacy of IL-2, reduce the toxic side effects of IL-2 and achieve a good production performance at the same time:

[0056] (i) introducing a certain residue mutation into the binding interface of IL-2 to the IL-2Rβγ receptor to weaken the binding to the IL-2Rβγ receptor and to down-regulate the activity of IL-2 to some extent. By including such mutations that weaken the binding to the IL-2Rβγ receptor, the IL-2 mutant protein disclosed herein can activate lymphocytes to kill tumors, while avoiding the release of a large amount of inflammatory factors, and thus drug-related toxicity, caused by over-activation of lymphocytes. In addition, by reducing the binding affinity of the IL-2 mutant protein disclosed herein for the IL-2 receptors extensively occurred on lymphocytes, the weakening mutations can also reduce the clearance of the IL-2 mutant protein mediated by the IL-2 receptors and prolong the period of action of the IL-2 mutant protein;

[0057] (ii) constructing the IL-2 mutant protein disclosed herein into an IL-2-Fc dimer. The formation of this dimer can increase the molecular weight of the IL-2 mutant protein disclosed herein, greatly reducing renal clearance and further extending the half-life of the IL2-Fc fusion protein by FcRn-mediated in vivo recycling. Thus, the high peak plasma concentration problem caused by the short half-life and high-frequency large-dose administration of IL-2 is overcome;

[0058] (iii) engineering the B′C′ loop structure of IL-2, for example, by replacing with the loop of the IL-15 molecule or by truncating the B′C′ loop of the IL-2 molecule. The B′C′ loop mutation can significantly enhance the stability of the B′C′ loop structure in the IL-2 mutant protein disclosed herein, and significantly improve the production performance of the IL-2 mutant protein and the IL-2-Fc dimeric molecule constructed thereof, e.g., significantly improving the expression yield and purity.

[0059] Furthermore, the inventors have found that in the mutant protein disclosed herein, the binding activity of the IL-2 mutant protein to IL-2Rα can be regulated as needed, while the excellent properties described above are kept, to meet different drug-forming requirements of IL-2 in multiple aspects such as in anti-tumor therapy or in the treatment of autoimmune diseases, and thus to further impart excellent pharmacodynamic properties to the mutant protein disclosed herein.

[0060] For example, the mutant protein disclosed herein can maintain substantially comparable binding activity to IL-2Rα as the wild-type IL-2; or can combine the following mutations: (iv) one or more specific mutations at the binding interface of IL-2 to the IL-2Rα receptor, to change the binding performance of the IL-2 mutant protein to IL-2Rα.

[0061] Thus, through the engineering of the sequence, the IL-2-Fc molecules disclosed herein, in one aspect, have weakened binding affinity for the IL2Rβ/γ receptor and achieve more excellent pharmacokinetic experimental results and pharmacodynamic results, and, in another aspect, have significantly improved druggability such as the protein expression yield and purity.

[0062] Thus, the present invention provides an IL-2 mutant protein with improved druggability and improved IL-2 receptor binding properties. IL-2-Fc molecules comprising the IL-2 mutant protein disclosed herein can effectively avoid excessive release of inflammatory factors caused by strong agonizing of lymphocytes, and has more stable and long-acting pharmacokinetic properties. Thus, a sufficiently high drug exposure can be achieved in the human body with a lower single dose, which avoids drug-related toxicity resulting from high Cₘₐₓ. Furthermore, it is more significant that, although the long-acting IL-2-Fc molecule of the present invention has weakened immunostimulatory activity for lymphocytes relative to native IL-2, the in vivo effective drug concentration of the molecule of the present invention is more lasting due to the significant improvements to the pharmacokinetic properties and it can achieve a long period of constant stimulation of lymphocytes, a comparable pharmacodynamic effect to or even a better pharmacodynamic effect than native IL-2 molecules, and better anti-tumor efficacy and tolerance in animals.

[0063] Improved Druggability

[0064] In some embodiments, the IL-2 mutant protein disclosed herein has improved druggability. For example, when expressed in mammalian cells such as HEK293 cells or CHO cells, particularly in the form of an Fc fusion protein, the IL-2 mutant protein has one or more properties selected from the following: (i) a superior expression yield to the wild-type IL-2 protein; and (ii) ease of purification to a higher protein purity.

[0065] In some embodiments disclosed herein, the IL-2 mutant protein disclosed herein shows an increased expression level compared to the wild-type IL-2. In some embodiments disclosed herein, the increased expression occurs in a mammalian cell expression system. The expression level can be determined by any suitable method that allows for quantitative or semi-quantitative analysis of the amount of recombinant IL-2 protein in cell culture supernatant, preferably the supernatant purified by one-step affinity chromatography. For example, the amount of recombinant IL-2 protein in a sample can be assessed by Western blotting or ELISA. In some embodiments, the expression yield of the IL-2 mutant protein disclosed herein in mammalian cells is increased by at least 1.1 times, or at least 1.5 times, or at least 2 times, 3 times or 4 times or more, or at least 5, 6, 7, 8 or 9 times, or even 10 times or more, e.g., about 10, 15, 20, 25, 30 or 35 times, compared to that of the wild-type IL-2.

[0066] In some embodiments, as shown by determining the purity of the protein purified by protein A affinity chromatography, the IL-2 mutant protein-Fc fusion disclosed herein has higher purity, relative to the wild-type IL-2 protein fusion. In some embodiments, the purity of the protein is determined by SEC-HPLC. In some preferred embodiments, the IL-2 mutant protein-Fc fusion disclosed herein can have a purity of up to 70%, or 80%, or 90% or higher, preferably 92%, 93%, 94%, 95%, 98% or 99% or higher, after being purified by one-step protein A affinity chromatography.

[0067] In some embodiments, as shown by determining the purity of the protein purified by protein A affinity chromatography, the IL-2-Fc dimer protein disclosed herein has higher purity, relative to the corresponding IL-2-Fc dimer protein formed of the wild-type IL-2 protein. In some embodiments, the purity of the protein is determined by SEC-HPLC. In some preferred embodiments, the IL-2-Fc dimer protein disclosed herein can have a purity of up to 70%, or 80%, or 90% or higher, preferably 92%, 93%, 94%, 95%, 98% or 99% or higher, after being purified by one-step protein A affinity chromatography.

[0068] Weakened Binding to IL-2βγ Receptor

[0069] By introducing a mutation into the binding interface to IL-2Rβγ, in some embodiments, the IL-2 mutant protein disclosed herein has weakened binding affinity for IL-2βγ relative to the corresponding protein before the introduction of the mutation.

[0070] In some embodiments, the IL-2 mutant protein disclosed herein has reduced binding affinity for the IL-2Rβ and/or IL-2Rβγ receptor relative to that before weakening by introducing an IL-2Rβγ binding interface mutation. In some embodiments, the IL-2 mutant protein disclosed herein has reduced binding affinity for the IL-2Rβ receptor relative to that before weakening; for example, the binding affinity is reduced by 1-20 times or more. In some embodiments, binding to the IL-2Rβ receptor is eliminated. In some embodiments, the IL-2 mutant protein disclosed herein has reduced binding affinity for the IL-2Rβγ receptor relative to that before weakening; for example, the binding affinity is reduced by 1-100 times or more. In some embodiments, the IL-2 mutant protein disclosed herein does not bind to the IL-2Rβ receptor, but is still capable of binding to the IL-2Rβγ receptor. Preferably, the binding to the IL-2Rβγ receptor is reduced by 1-100 times, e.g., about 20-80 times, compared to that before weakening. The binding affinity can be determined by measuring the equilibrium dissociation constant (K_{D}) of the binding of the IL-2 mutant protein disclosed herein, such as the IL-2 mutant protein disclosed herein fused to an Fc fragment or the dimeric molecule thereof, to the IL-2Rβ or IL-2Rβγ receptor using the ForteBio affinity assay technique.

[0071] By introducing mutations into the binding interface to IL-2Rβγ, in some embodiments, the IL-2 mutant protein disclosed herein, relative to the corresponding protein before the introduction of the mutations, has weakened IL-2 activity, e.g., at least one IL-2 activity selected from the following:

[0072] reduced activation of T cells (e.g. CD4⁺ and CD8⁺ T cells, e.g. CD4⁺/CD8⁺ CD25⁻ T cells, or CD4⁺ CD25⁺ T cells), compared to that before weakening;

[0073] reduced activation of NK cells, compared to that before weakening; and

[0074] reduced IL-2-stimulated release of inflammatory factors from T cells/NK cells, compared to that before weakening.

[0075] In one embodiment, the IL-2 mutant protein disclosed herein leads to reduced IL-2-mediated activation and/or proliferation of lymphocytes (e.g., T cells and/or NK cells) relative to that before weakening. In one embodiment, the lymphocytes are CD4⁺ and CD8⁺ T cells, such as CD25⁻ T cells. In one embodiment, in the STAT5 phosphorylation assay, the ability of the IL-2 mutant protein to activate CD4⁺ and CD8⁺ T cells is identified by measuring the activation of STAT5 phosphorylation signals by the IL-2 mutant protein in lymphocytes such as T cells or NK cells. For example, as described in the examples of this application, STAT5 phosphorylation in cells can be analyzed by flow cytometry to determine the half maximum effective concentration (EC₅₀). For example, by measuring the ratio of EC₅₀ values of activation of STAT5 phosphorylation signals by the IL-2 weakened molecule disclosed herein and the corresponding protein, the IL-2 mutant molecule disclosed herein has “weakened” activation activity for T cells. According to the ratio, the activation activity of the IL-2 mutant molecule disclosed herein for T cells can be reduced by, e.g., 5 times or more, e.g., 10 times or more, or 50 times or more, or 100 times or more, or even 1000 times or more. For example, the activation activity of the IL-2 mutant molecule disclosed herein for T cells can be reduced by 10-50 times, or 50-100 times, or 100-1000 times, or more, relative to the corresponding protein. In some preferred embodiments, the IL-2 mutant protein disclosed herein has reduced cell surface IL-2 receptor-mediated clearance of IL-2 and an increased in vivo half-life, relative to the wild-type IL-2.

[0076] In some preferred embodiments, the IL-2 mutant protein disclosed herein has reduced in vivo toxicity mediated by IL-2 and its receptors relative to the wild-type IL-2.

[0077] Maintained or Altered Binding to IL-2Rα Receptor

[0078] The IL-2 protein triggers signaling and functions by interacting with IL-2 receptors. Wild-type IL-2 exhibits different affinities for different IL-2 receptors. IL-2β and IL-2γ receptors having a low affinity for wild-type IL-2 are expressed on resting effector cells, including CD8⁺ T cells and NK cells. IL-2Rα receptors having a high affinity for wild-type IL-2 are expressed on regulatory T cell (Treg) cells and activated effector cells. Due to high affinity, the wild-type IL-2 will preferentially bind to IL-2Rα on the cell surface and then recruit IL-2Rβγ. Treg cells and activated effector cells are stimulated by downstream p-STAT5 signals released through the IL-2Rβγ. Without being bound by theory, altering the affinity of IL-2 for the IL-2Rα receptor will alter the preference of IL-2 for preferentially activating CD25⁺ cells and the IL-2-mediated immune downregulation of Treg cells.

[0079] In some embodiments, the IL-2 mutant protein disclosed herein has a maintained or an altered ability to bind to the IL-2Rα receptor relative to the wild-type IL-2.

[0080] In some embodiments, the IL-2 mutant protein disclosed herein maintains binding to the IL-2Rα receptor relative to the wild-type IL-2. As used herein, the expression “maintain binding to the IL-2Rα receptor” means that the IL-2 mutant protein has a comparable binding activity to the IL-2Rα receptor relative to the wild-type IL-2 protein. Preferably, “comparable binding activity” means that when measured in the same manner, the binding activity values (e.g., binding affinity K_{D}) of the IL-2 mutant protein and the wild-type IL-2 protein are in a ratio between 1:20 and 20:1, preferably between 1:10 and 10:1. Preferably, the IL-2 mutant protein does not have an IL-2Rα binding interface mutation relative to the wild-type IL-2.

[0081] In some embodiments, the IL-2 mutant protein disclosed herein is a weakened IL-2 mutant molecule which maintains binding to the IL-2Rα receptor. In still other embodiments, the weakened IL-2 mutant protein disclosed herein does not have an IL-2Rα binding interface mutation relative to the wild-type IL-2. Preferably, the weakened IL-2 mutant molecule has improved selectivity for Treg and/or improved selectivity for NK cells (e.g., CD3⁻ CD56⁺ NK cells). In one embodiment, in the STAT5 phosphorylation assay, the selectivity of the IL-2 mutant protein for lymphocytes is identified by measuring the activation of STAT5 phosphorylation signals by the IL-2 mutant protein in different lymphocytes such as Treg cells, NK cells and CD4⁺ and CD8⁺ effector T cells. In one embodiment, in the STAT5 phosphorylation assay, the selectivity of the IL-2 mutant protein can be reflected by a dose window of the IL-2 mutant protein that selectively activates specific (one or more types of) lymphocytes without substantially activating other lymphocytes. For example, in some embodiments, the weakened IL-2 mutant protein disclosed herein may exhibit improved selectivity for Treg and/or improved selectivity for NK cells (CD3⁻ CD56⁺ NK cells) relative to that for effector T cells, such as CD25^{-/low} CD4⁺ and/or CD8⁺ effector T lymphocytes. In still other embodiments, the improved selectivity may be reflected by low drug-related toxicity of the IL-2 mutant protein.

[0082] In other embodiments, the IL-2 mutant protein disclosed herein has a mutation introduced into the binding interface to IL-2Rα relative to the wild-type IL-2, the mutation causing the IL-2 mutant protein to have reduced or eliminated binding to the IL-2Rα receptor.

[0083] In still other embodiments, the IL-2 mutant protein disclosed herein reduces the preference of IL-2 for preferentially activating CD25⁺ cells relative to the wild-type IL-2. In still other embodiments, the IL-2 mutant protein disclosed herein reduces IL-2-mediated immune downregulation of Treg cells relative to the wild-type IL-2.

[0084] In other embodiments, the IL-2 mutant protein disclosed herein has an immune downregulation effect. In still other embodiments, the IL-2 mutant protein disclosed herein can be used to treat autoimmune diseases.

[0085] Therefore, in some embodiments, the IL-2 mutant protein disclosed herein has one or more improved properties selected from the following:

[0086] maintained or altered (e.g. reduced or increased) binding affinity for a high affinity IL-2R receptor (IL-2Rαβγ), compared to the wild-type IL-2;

[0087] maintained or altered (e.g. reduced or increased) activation of CD25⁺ cells (e.g., CD8⁺ T cells and Treg cells), compared to the wild-type IL-2;

[0088] maintained or altered (e.g. eliminated or reduced, or increased) preference of IL-2 for preferentially activating CD25⁺ cells (e.g. Treg cells), compared to wild-type IL-2; and

[0089] maintained or altered (e.g. reduced or increased) IL-2-induced downregulation of the immune response by Treg cells, compared to wild-type IL-2.

[0090] In some embodiments, the binding affinity of the IL-2 mutant protein disclosed herein for the IL-2Rα receptor is reduced by at least 5 times, at least 10 times, or at least 25 times, particularly at least 30 times, 50 times or 100 times or more, relative to the wild-type IL-2 (e.g., IL-2^{WT} set forth in SEQ ID NO: 1). In a preferred embodiment, the mutant protein disclosed herein does not bind to the IL-2Rα receptor. The binding affinity can be determined by measuring the equilibrium dissociation constant (K_{D}) of the binding of the IL-2 mutant protein disclosed herein, such as the IL-2 mutant protein disclosed herein fused to an Fc fragment or the dimeric molecule thereof, to the IL-2Rα receptor using the ForteBio affinity assay technique.

[0091] In one embodiment, the IL-2 mutant protein disclosed herein reduces IL-2-mediated activation and/or proliferation of CD25⁺ cells relative to the wild-type IL-2. In one embodiment, the CD25⁺ cells are CD25⁺ CD8⁺ T cells. In another embodiment, the CD25⁺ cells are Treg cells. In one embodiment, in the STAT5 phosphorylation assay, the ability of the IL-2 mutant protein to activate CD25⁺ cells is identified by measuring the activation of STAT5 phosphorylation signals by the IL-2 mutant protein in CD25⁺ cells. For example, as described in the examples of this application, STAT5 phosphorylation in cells can be analyzed by flow cytometry to determine the half maximum effective concentration (EC₅₀).

[0092] In one embodiment, the IL-2 mutant protein disclosed herein eliminates or reduces the preference of IL-2 for preferentially activating CD25⁺ cells relative to the wild-type IL-2. In one embodiment, the CD25⁺ cells are CD25⁺ CD8⁺ T cells. In another embodiment, the CD25⁺ cells are Treg cells. In one embodiment, in the STAT5 phosphorylation assay, the ability of the IL-2 mutant protein to activate CD25⁻ cells is identified by measuring the EC₅₀ values of the IL-2 mutant protein in activating STAT5 phosphorylation signals in CD25⁻ cells and in CD25⁺ cells, respectively. For example, the activation preference of the IL-2 mutant protein for CD25⁺ cells is determined by calculating the ratio of EC₅₀ values of the IL-2 mutant protein in activating STAT5 phosphorylation signals in CD25⁻ and in CD25⁺ T cells. Preferably, the preference of the mutant protein for CD25⁺ cells is reduced by at least 10 times, preferably at least 100 times, 150 times, 200 times, or 300 times or more, relative to the wild-type protein.

[0093] The Mutant Protein Disclosed Herein

[0094] In one aspect, the present invention provides an IL-2 mutant protein, which, compared to a wild-type IL-2 (preferably a human IL-2, and more preferably an IL-2 comprising the sequence of SEQ ID NO: 1), comprises mutations:

[0095] (i) a mutation that eliminates or reduces binding affinity for an IL-2Rα receptor, at a binding interface of IL-2 to IL-2Rα, particularly at at least one position selected from positions 35, 37, 38, 41, 42, 43, 45, 61, 68 and 72;

[0096] and/or

[0097] (ii) a shortened B′C′ loop region (i.e., a sequence linking amino acid residues aa72 and aa84), wherein preferably, the shortened loop region has less than 10, 9, 8, 7, 6 or 5 amino acids in length, and more preferably has 7 amino acids in length; preferably, the shortened B′C′ loop region leads to an improved protein expression yield and/or purity;

[0098] and comprises a mutation:

[0099] (iii) a mutation that weakens binding to an IL-2Rβγ receptor, at a binding interface of IL-2 to IL-2Rβγ, particularly at at least one position selected from positions 12, 15, 16, 19, 20, 84, 87, 88, 91, 92, 95 and 126;

[0100] wherein, the amino acid positions are numbered according to SEQ ID NO: 1;

[0101] preferably, the mutant protein comprises the mutations (i) and (iii), or comprises the mutations (ii) and (iii), or comprises the mutations (i), (ii) and (iii).

[0102] IL-2Rβγ Binding Interface Mutation

[0103] An IL-2Rβγ binding interface mutation suitable for the mutant protein disclosed herein may be any mutation that can be combined with the other mutations of the present invention and leads to weakened binding affinity for IL-2Rβγ and/or weakened activation activity for lymphocytes (e.g., T cells/NK cells).

[0104] Examples of such mutations include, but are not limited to: mutations that leads to weakened binding to the IL-2Rβγ receptor, at the binding interface of IL-2 to IL-2Rβγ, particularly at at least one position selected from positions 12, 15, 16, 19, 20, 84, 87, 88, 91, 92, 95 and 126.

[0105] In some embodiments, the IL-2Rβγ binding interface mutation includes mutations selected from the following: L12R, L12K, L12E, L12Q, E15Q, E15R, E15A, E15S, H16N, H16T, H16Y, H16A, H16E, H16D, H16R, L19D, L19E, L19R, L19S, D20N, D20Q, D20E, D20A, D20R, D20S, D84N, D84E, D84Q, D84T, D84S, D84R, D84G, D84M, D84F, D84L, D84K, D84H, S87T, S87R, S87K, S87L, S87M, S87H, N88D, N88T, N88Q, N88R, N88E, N88K, N88H, N88M, N88S, N88L, V91I, V91L, V91D, V91E, V91N, V91Q, V91S, V91H, I92E, I92T, I92K, I92R, I92L, E95Q, E95G, E95D, E95N, Q126E, Q126D, Q126A, Q126S, D84N+E95Q, D84E+E95Q, D84T+E95Q, D84Q+E95Q, D84T+H16T, D84N+V91I, D84T+Q126E, D84N+Q126E, H16T+D84Q and H16T+V91I.

[0106] In some preferred embodiments, the IL-2Rβγ binding interface mutation includes mutations selected from the following:

[0107] D20N, D84E, D84N, D84N+E95Q, D84N+Q126E, D84N+V91I, D84Q, D84T, D84T+H16T, D84T+Q126E, E15Q, E95N, E95Q, H16N, H16N+D84N, H16T, H16T+D84Q, H16T+V91I, N88R, N88D, N88Q, N88T, Q126E and V91I.

[0108] In still other preferred embodiments, the IL-2Rβγ binding interface mutation includes

[0109] a mutation selected from the following: D84N, E95Q and H16N; or

[0110] a mutation selected from the following: D84Q and H16T+V91I; or

[0111] a mutation selected from the following: D84T, Q126E, D84N+V91I and D84N+E95Q; or

[0112] a mutation selected from the following: N88D, N88R, D20N, D84N+E95Q, D84T+H16T, D84T+Q126E, D84N+Q126E and H16T+D84Q.

[0113] In still other preferred embodiments, the IL-2Rβγ binding interface mutation includes mutations selected from the following: D20N, N88D and N88R.

[0114] B′C′ Loop Region Mutations

[0115] In one aspect, the IL-2 mutant protein disclosed herein, relative to the wild-type IL-2, comprises a B′C′ loop region mutation; preferably, the mutation leads to a B′C′ loop region with increased stability; more preferably, the mutation leads to improved druggability of the IL-2 mutant protein disclosed herein, e.g., an increased expression yield and/or purity.

[0116] In some embodiments, due to the mutation introduced, the mutant protein comprises a shortened B′C′ loop region (i.e., a shortened linker sequence between the amino acid residues aa72 and aa84) compared to the wild-type IL-2 (preferably the human IL-2, and more preferably the IL-2 comprising the sequence of SEQ ID NO: 1).

[0117] Preferably, the shortened loop region has less than 10, 9, 8, 7, 6 or 5 amino acids in length, and more preferably has 7 amino acids in length, wherein the amino acid residues are numbered according to SEQ ID NO: 1.

[0118] Herein, B′C′ loop region mutations suitable for the present invention include truncations and replacements of the B′C′ loop region. In one embodiment, the mutations include truncations or replacements of the amino acid residues aa73 to aa83 in the B′C′ loop region, e.g., a truncation to form A(Q/G)SKN(F/I)H, or a replacement with SGDASIH. In another embodiment, the mutations include truncations or replacements of the amino acid residues aa74 to aa83 in the B′C′ loop region, e.g., a truncation to form (Q/G)SKN(F/I)H, or a replacement with GDASIH.

[0119] In some embodiments, the IL-2 mutant protein disclosed herein comprises a B′C′ loop chimeric mutation. The mutant protein, relative to the wild-type IL-2, comprises a substitution of the entirety or a part of the sequence linking aa72 to aa84, for example, with a short B′C′ loop sequence from other four-helical short-chain cytokine family members. The short B′C′ loop suitable for the substitution of the wild-type IL-2 can be identified from other four-helical short-chain cytokine IL family members, such as IL-15, IL-4, IL-21, or IL family members from non-human species such as mice, by the superpose of a crystal structure. In one embodiment, the sequence used for substitution is a B′C′ loop sequence from interleukin IL-15, particularly human IL-15. In one embodiment, the substitution includes substitutions of the amino acid residues aa73 to aa83 in the B′C′ loop region. In another embodiment, the substitution includes substitutions of the amino acid residues aa74 to aa83 in the B′C′ loop region. Preferably, the IL-2 mutant protein disclosed herein, after the substitutions, has a B′C′ loop sequence (i.e., a sequence linking aa72 to aa84) selected from the following: SGDASIH and AGDASIH.

[0120] In some embodiments, the IL-2 mutant protein disclosed herein comprises a B′C′ loop truncation mutation. The mutant protein, relative to the wild-type IL-2, comprises a truncation of the sequence linking aa72 to aa84. In one embodiment, the truncation includes truncations of the amino acid residues aa73 to aa83 in the B′C′ loop region. In another embodiment, the truncation includes truncations of the amino acid residues aa74 to aa83 in the B′C′ loop region. For example, the sequence may be truncated by 1, 2, 3 or 4 amino acids at the C-terminus. Preferably, after the truncation, the IL-2 mutant protein disclosed herein has a B′C′ loop region having a sequence of A(Q/G)SKN(F/I)H. Preferably, after the truncation, the IL-2 mutant protein disclosed herein has a B′C′ loop sequence (i.e., a sequence linking aa72 to aa84) selected from the following:

B′C′ loop sequence
AQSKNFH
AGSKNFH
AQSANFH
AQSANIH

[0121] In one preferred embodiment, the IL-2 mutant protein disclosed herein comprises a B′C′ loop region sequence (i.e., a sequence linking aa72 to aa84) selected from the following: AQSKNFH, SGDASIH and AGDASIH.

[0122] For B′C′ loop mutations suitable for the present invention, see also the applicant's co-pending application PCT/CN2019/107054, which is incorporated herein by reference in its entirety.

[0123] IL-2Rα Binding Interface Mutation

[0124] In one aspect, the IL-2 mutant protein disclosed herein, relative to the wild-type IL-2, comprises one or more mutations at the binding interface to IL-2Rα, preferably at positions 35, 37, 38, 41, 42, 43, 45, 61, 68 and 72. Preferably, the mutation eliminates or reduces binding affinity for the IL-2Rα receptor.

[0125] In some embodiments, the IL-2Rα binding interface mutation of the present invention includes a combination of mutations selected from one of the following combinations (1)-(9):

| Combinations | Mutations |
|---|---|
| 1 | K35D/E + T37E/D + R38Y/W + F42N/Q + Y45R/K + E61R/K + E68K/R, preferably |
| | K35D/E + T37E/D + R38W + F42Q + Y45R/K + E61R/K + E68K/R, and more preferably |
| | K35D/E + T37E/D + R38W + F42Q + Y45K + E61K + E68R |
| 2 | K35D/E + T37D/E + R38D/E + F42V/L/I/A, preferably K35D/E + T37D/E + R38D/E + F42V/A, and |
| | more preferably K35D/E + T37D/E + R38D/E + F42A |
| 3 | K35E/D + R38D/E + T41D/E + K43D/E, preferably K35E/D + R38D/E + T41E + K43E |
| 4 | K35E/D + T37D/E + R38E/D + K43F/Y + Y45K + L72F, more preferably |
| | K35E/D + T37D/E + R38E/D + K43Y + Y45K + L72F |
| 5 | K35D/E + R38D/E + T41D/E + K43Y + Y45R/K + L72Y/F, more preferably |
| | K35D/E + R38D/E + T41D/E + K43Y + Y45K + L72F |
| 6 | K35E/D + T37D/E + R38E/D + T41D/E + K43D/E + L72Y/F, more preferably |
| | K35E/D + T37D/E + R38E/D + T41D/E + K43D/E + L72F |
| 7 | K35E/D + T37D/E + R38E/D + K43D/E + L72Y/F, more preferably |
| | K35E/D + T37D/E + R38E/D + K43D/E + L72F |
| 8 | K35D/E + T37E/D + R38E/D + K43D/E + L72Y/F, more preferably |
| | K35D/E + T37E/D + R38E/D + K43D/E + L72F |
| 9 | K35D/E + R38E/D + T41D/E + K43D/E + E61R/K + L72Y/F, more preferably |
| | K35D/E + R38E/D + T41D/E + K43D/E + E61K + L72F |

[0126] In some preferred embodiments, the IL-2Rα binding interface mutation of the present invention includes or consists of the combination of mutations K35E+T37E+R38E+F42A.

[0127] In other preferred embodiments, the IL-2Rα binding interface mutation of the present invention includes or consists of the combination of mutations K35E+T37E+R38E.

[0128] In other preferred embodiments, the IL-2Rα binding interface mutation of the present invention includes or consists of the mutation F42A.

[0129] In other embodiments, the IL-2 mutant protein disclosed herein comprising the IL-2Rα binding interface mutation of the present invention has altered binding to IL-2Rα, as determined, e.g., by a ForteBio affinity assay.

[0130] For IL-2Rα binding interface mutations suitable for the present invention, see also the applicant's co-pending application PCT/CN2019/107055, which is incorporated herein by reference in its entirety.

[0131] Preferred Exemplary Combinations of Mutations

[0132] In some preferred embodiments, the IL-2 mutant protein disclosed herein has weakened binding to IL-2Rβγ and has improved properties selected from one or both of: (i) reduced (or eliminated) binding to IL-2Rα; and (ii) improved expression level and purity.

[0133] In some embodiments, the present invention provides an IL-2 mutant protein, which comprises, relative to the wild-type IL-2:

[0134] (a) a combination of mutations K35E+T37E+R38E+F42A;

[0135] (b) an IL-2Rβγ binding interface mutation, selected from the following:

[0136] D20N, D84E, D84N, D84N+E95Q, D84N+Q126E, D84N+V91I, D84Q, D84T, D84T+H16T, D84T+Q126E, E15Q, E95N, E95Q, H16N, H16N+D84N, H16T, H16T+D84Q, H16T+V91I, N88D, N88R, N88Q, N88T, Q126E and V91I;

[0137] and optionally, (iv) a mutation T3A.

[0138] In some embodiments, the present invention provides an IL-2 mutant protein, which comprises, relative to the wild-type IL-2:

[0139] (a) a combination of mutations K35E+T37E+R38E;

[0140] (b) an IL-2Rβγ binding interface mutation, selected from the following:

[0141] D20N, D84E, D84N, D84N+E95Q, D84N+Q126E, D84N+V91I, D84Q, D84T, D84T+H16T, D84T+Q126E, E15Q, E95N, E95Q, H16N, H16N+D84N, H16T, H16T+D84Q, H16T+V91I, N88D, N88R, N88Q, N88T, Q126E and V91I;

[0142] and optionally, (iv) a mutation T3A.

[0143] In some embodiments, the present invention provides an IL-2 mutant protein, which comprises, relative to the wild-type IL-2:

[0144] (a) a mutation F42A;

[0145] (b) an IL-2Rβγ binding interface mutation, selected from the following:

[0146] D20N, D84E, D84N, D84N+E95Q, D84N+Q126E, D84N+V91I, D84Q, D84T, D84T+H16T, D84T+Q126E, E15Q, E95N, E95Q, H16N, H16N+D84N, H16T, H16T+D84Q, H16T+V91I, N88D, N88R, N88Q, N88T, Q126E and V91I;

[0147] and optionally, (iv) a mutation T3A.

[0148] In some embodiments, the present invention provides an IL-2 mutant protein, which comprises, relative to the wild-type IL-2:

[0149] (a) a B′C′ loop region sequence AQSKNFH;

[0150] (b) an IL-2Rβγ binding interface mutation, selected from the following:

[0151] D20N, D84E, D84N, D84N+E95Q, D84N+Q126E, D84N+V91I, D84Q, D84T, D84T+H16T, D84T+Q126E, E15Q, E95N, E95Q, H16N, H16N+D84N, H16T, H16T+D84Q, H16T+V91I, N88D, N88R, N88Q, N88T, Q126E and V91I;

[0152] and optionally, (iv) a mutation T3A. Preferably, the IL-2 mutant protein maintains an ability to bind to the IL-2Rαreceptor relative to the wild-type IL-2 protein.

[0153] In some embodiments, the present invention provides an IL-2 mutant protein, which comprises, relative to the wild-type IL-2:

[0154] (a) a B′C′ loop region sequence SGDASIH or AGDASIH;

[0155] (b) an IL-2Rβγ binding interface mutation, selected from the following:

[0156] D20N, D84E, D84N, D84N+E95Q, D84N+Q126E, D84N+V91I, D84Q, D84T, D84T+H16T, D84T+Q126E, E15Q, E95N, E95Q, H16N, H16N+D84N, H16T, H16T+D84Q, H16T+V91I, N88D, N88R, N88Q, N88T, Q126E and V91I;

[0157] and optionally, (iv) a mutation T3A. Preferably, the IL-2 mutant protein maintains binding to the IL-2Rα receptor relative to the wild-type IL-2 protein.

[0158] In some embodiments, the IL-2 mutant protein disclosed herein comprises, relative to the wild-type IL-2:

[0159] (i) a combination of mutations K35E+T37E+R38E+F42A, or a combination of mutations K35E+T37E+R38E, or a mutation F42A;

[0160] (ii) a B′C′ loop region sequence: AQSKNFH; or SGDASIH or AGDASIH;

[0161] (iii) an IL-2Rβγ binding interface mutation, selected from the following:

[0162] D20N, D84E, D84N, D84N+E95Q, D84N+Q126E, D84N+V91I, D84Q, D84T, D84T+H16T, D84T+Q126E, E15Q, E95N, E95Q, H16N, H16N+D84N, H16T, H16T+D84Q, H16T+V91I, N88D, N88R, N88Q, N88T, Q126E and V91I;

[0163] and optionally, (iv) a mutation T3A.

[0164] In some embodiments, the IL-2 mutant protein disclosed herein comprises, relative to the wild-type IL-2:

[0165] (i) a combination of mutations K35E+T37E+R38E+F42A;

[0166] (ii) a B′C′ loop region sequence: AQSKNFH;

[0167] (iii) an IL-2Rβγ binding interface mutation, selected from the following:

[0168] D20N, D84E, D84N, D84N+E95Q, D84N+Q126E, D84N+V91I, D84Q, D84T, D84T+H16T, D84T+Q126E, E15Q, E95N, E95Q, H16N, H16N+D84N, H16T, H16T+D84Q, H16T+V91I, N88D, N88R, N88Q, N88T, Q126E and V91I;

[0169] and optionally, (iv) a mutation T3A.

[0170] In some embodiments, the IL-2 mutant protein disclosed herein comprises, relative to the wild-type IL-2:

[0171] (i) a combination of mutations K35E+T37E+R38E+F42A;

[0172] (ii) a B′C′ loop region sequence: SGDASIH or AGDASIH;

[0173] (iii) an IL-2Rβγ binding interface mutation, selected from the following:

[0174] D20N, D84E, D84N, D84N+E95Q, D84N+Q126E, D84N+V91I, D84Q, D84T, D84T+H16T, D84T+Q126E, E15Q, E95N, E95Q, H16N, H16N+D84N, H16T, H16T+D84Q, H16T+V91I, N88D, N88R, N88Q, N88T, Q126E and V91I;

[0175] and optionally, (iv) a mutation T3A.

[0176] In some embodiments, the IL-2 mutant protein disclosed herein comprises, relative to the wild-type IL-2:

[0177] (i) a combination of mutations K35E+T37E+R38E;

[0178] (ii) a B′C′ loop region sequence: AQSKNFH;

[0179] (iii) an IL-2Rβγ binding interface mutation, selected from the following:

[0180] D20N, D84E, D84N, D84N+E95Q, D84N+Q126E, D84N+V91I, D84Q, D84T, D84T+H16T, D84T+Q126E, E15Q, E95N, E95Q, H16N, H16N+D84N, H16T, H16T+D84Q, H16T+V91I, N88D, N88R, N88Q, N88T, Q126E and V91I;

[0181] and optionally, (iv) a mutation T3A.

[0182] In some embodiments, the IL-2 mutant protein disclosed herein comprises, relative to the wild-type IL-2:

[0183] (i) a combination of mutations K35E+T37E+R38E;

[0184] (ii) a B′C′ loop region sequence SGDASIH or AGDASIH;

[0185] (iii) an IL-2Rβγ binding interface mutation, selected from the following:

[0186] D20N, D84E, D84N, D84N+E95Q, D84N+Q126E, D84N+V91I, D84Q, D84T, D84T+H16T, D84T+Q126E, E15Q, E95N, E95Q, H16N, H16N+D84N, H16T, H16T+D84Q, H16T+V91I, N88D, N88R, N88Q, N88T, Q126E and V91I;

[0187] and optionally, (iv) a mutation T3A.

[0188] In some preferred embodiments, the IL-2 mutant protein disclosed herein comprises, relative to the wild-type IL-2:

[0189] (i) a combination of mutations K35E+T37E+R38E+F42A;

[0190] (ii) a B′C′ loop region sequence SGDASIH or AGDASIH;

[0191] (iii) IL-2Rβγ binding interface mutations: D84N or D84N+E95Q;

[0192] and optionally, (iv) a mutation T3A. More preferably, the IL-2 mutant protein disclosed herein comprises, relative to the wild-type IL-2: (i) a combination of mutations K35E+T37E+R38E+F42A; (ii) a B′C′ loop region sequence AGDASIH; (iii) IL-2Rβγ binding interface mutations: D84N+E95Q.

[0193] In still other preferred embodiments, the IL-2 mutant protein disclosed herein, relative to the wild-type IL-2 protein, maintains binding to the IL-2Rα receptor and comprises:

[0194] (i) a B′C′ loop region sequence AQSKNFH; SGDASIH or AGDASIH;

[0195] (ii) an IL-2Rβγ binding interface mutation, selected from the following: D20N, N88R and N88D;

[0196] and optionally (iii) a mutation T3A. Preferably, the IL-2 mutant protein does not have an IL-2Rα binding interface mutation relative to the wild-type IL-2.

[0197] In other preferred embodiments, the IL-2 mutant protein disclosed herein, relative to the wild-type IL-2 protein, maintains binding to the IL-2Rα receptor and comprises:

[0198] (i) a B′C′ loop region sequence SGDASIH or AGDASIH;

[0199] (ii) an IL-2Rβγ binding interface mutation: D20N, or N88R, or N88D;

[0200] and optionally (iii) a mutation T3A. Preferably, the IL-2 mutant protein does not have an IL-2Rα binding interface mutation relative to the wild-type IL-2.

[0201] In other preferred embodiments, the IL-2 mutant protein disclosed herein, relative to the wild-type IL-2 protein, maintains binding to the IL-2Rα receptor and comprises:

[0202] (i) a B′C′ loop region sequence AGDASIH;

[0203] (ii) an IL-2Rβγ binding interface mutation: D20N, or N88R, or N88D;

[0204] and optionally (iii) a mutation T3A. Preferably, the IL-2 mutant protein does not have an IL-2Rα binding interface mutation relative to the wild-type IL-2.

[0205] In still other preferred embodiments, the IL-2 mutant protein disclosed herein, relative to the wild-type IL-2 (e.g., SEQ ID NO: 1), maintains binding to the IL-2Rα receptor and comprises:

[0206] (i) a B′C′ loop region sequence AGDASIH;

[0207] (ii) an IL-2Rβγ binding interface mutation: N88R;

[0208] and (iii) a mutation T3A. Preferably, the IL-2 mutant protein does not have an IL-2Rα binding interface mutation relative to the wild-type IL-2. In one embodiment, the IL-2 mutant protein disclosed herein has a mature region having at least 85% or 90% identity in the amino acid sequence to that of the wild-type IL-2 protein set forth in one of SEQ ID NOs: 1-3.

[0209] In some preferred embodiments, the IL-2 mutant protein disclosed herein comprises an amino acid sequence having at least 90%, 92%, 93%, 94%, 95%, 96%, 97%, 98% or 99% identity to an amino acid sequence selected from one of SEQ ID NOs: 37-638 (particularly SEQ ID NOs: 469-553 or 554-638, preferably SEQ ID NOs: 148 and 197, more preferably SEQ ID NOs: 489, 513 and 516). In some embodiments, the mutant protein comprises or consists of an amino acid sequence selected from SEQ ID NOs: 37-638. In some preferred embodiments, the mutant protein comprises or consists of an amino acid sequence selected from SEQ ID NOs: 469-553 or 554-638, preferably SEQ ID NOs: 148 and 197, and more preferably SEQ ID NOs: 489, 513 and 516.

[0210] Other Mutations

[0211] In addition to the “IL-2Rβγ binding interface mutations”, “B′C′ loop region mutations” and “IL-2Rα binding interface mutations” described above, the IL-2 mutant protein disclosed herein can also have one or more mutations in other regions or positions, as long as it retains one or more beneficial properties described above. For example, the IL-2 mutant protein disclosed herein may also comprise a substitution at position 125, such as C125S, C125A, C125T, or C125V, so as to provide additional advantages, such as improved expression or homogeneity or stability (see, e.g., U.S. Pat. No. 4,518,584). As another example, the IL-2 mutant protein disclosed herein can also comprise a substitution at position 3, e.g., T3A, to remove the O-glycosylation at the N-terminus of IL2. Those skilled in the art know how to determine additional mutations that can be incorporated into the IL-2 mutant protein disclosed herein.

[0212] The sequence difference between the IL-2 mutant protein and the wild-type protein can be expressed in terms of sequence identity or in terms of the number of different amino acids between the two. In one embodiment, the IL-2 mutant protein has at least 85%, 86%, 87%, 88%, or 89% identity, preferably more than 90% (preferably 95%) but preferably no more than 97%, and more preferably no more than 96% identity to the wild-type protein.

[0213] In another embodiment, in addition to the three types of mutations described above in the present invention, the IL-2 mutant protein may also have no more than 15, e.g., 1-10, or 1-5, e.g., 0, 1, 2, 3 or 4, mutations relative to the wild-type protein. In one embodiment, the additional mutations may be conservative substitutions.

[0214] 2. Fusion Protein and IL-2-Fc Dimer Protein

[0215] In one aspect, the present invention also provides a fusion protein comprising the IL-2 mutant protein disclosed herein. In one preferred embodiment, the IL-2 mutant protein disclosed herein is fused to another polypeptide, such as albumin, and preferably an antibody Fc fragment, which can provide improved pharmacokinetic properties.

[0216] In one embodiment, the present invention provides an IL-2 mutant protein fusion protein, which comprises the IL-2 mutant protein disclosed herein fused to an antibody Fc fragment.

[0217] The Fc fragment for use in the present invention may comprise a mutation that reduces or eliminates effector functions. In one preferred embodiment, the Fc fragment has reduced Fc-mediated effector functions, such as reduced or eliminated ADCC or ADCP or CDC effector functions. For example, in some particular embodiments, the Fc fragment for use in the present invention has mutations L234A/L235A or L234A/L235E/G237A that reduce binding to the Fcγ receptor.

[0218] In yet another preferred embodiment, the Fc fragment may have a mutation that leads to an increased serum half-life, e.g., a mutation that improves binding of the Fc fragment to FcRn.

[0219] In some embodiments, the Fc fragment fused to the IL-2 mutant protein is a human IgG Fc, e.g., human IgG1 Fc, human IgG2 Fc or human IgG4 Fc. In one embodiment, the Fc fragment comprises the amino acid sequence of SEQ ID NO: 12, or has at least 90% identity, e.g., 95%, 96%, 97%, 99% or higher identity, thereto.

[0220] In some embodiments, the IL-2 mutant protein is fused to the Fc via a linker. In some embodiments, the linker may be selected to enhance the activation of the Fc fusion protein on CD25⁻ T cells. In one embodiment, the linker is GSGS, preferably (G4S)₂.

[0221] In a further aspect, the present invention also provides a dimeric molecule comprising the IL-2 mutant protein disclosed herein fused to an Fc fragment. With such a dimeric molecule, the molecular weight can be increased to 60-80 kDa, and the renal clearance is greatly reduced. In addition, the half-life of the IL2-Fc fusion protein can be further extended by FcRn-mediated in vivo recycling. Preferably, the dimeric molecule, compared to a corresponding dimeric molecule comprising a wild-type IL-2-Fc fusion protein, has one or more of the following properties:

[0222] an increased expression yield and/or purity, when expressed in mammalian cells (e.g., CHO or HEK293 cells);

[0223] reducing or avoiding over-activation of lymphocytes and/or release of inflammatory factors caused by IL-2;

[0224] more excellent pharmacokinetic properties, such as a delayed in vivo half-life; and

[0225] low toxicity when administered in vivo, e.g., low cardiovascular toxicity (e.g., a low vascular leak side effect).

[0226] Preferably, the dimeric molecule of the IL-2 mutant protein disclosed herein shows a good anti-tumor effect and tolerance when administered in animals. The anti-tumor effect can be determined by measuring the tumor inhibition rate in a tumor-bearing animal experiment as described in the examples. The tolerance can be determined by measuring the body weight and changes in the body weight of an animal model after administration as described in the examples.

[0227] In some embodiments, the present invention provides an IL-2-Fc dimer protein, which is a homodimer, wherein a first monomer and a second monomer comprise, from N-terminus to C-terminus, i) an IL-2 mutant protein; ii) a linker; and iii) an Fc fragment.

[0228] In other embodiments, the present invention provides an IL-2-Fc dimer protein, which is a heterodimer and comprises:

[0229] a) a first monomer, comprising, from N-terminus to C-terminus, i) an IL-2 mutant protein; ii) a linker; and iii) a first Fc fragment; and

[0230] b) a second monomer, comprising a second Fc fragment.

[0231] In some embodiments, the first Fc fragment and the second Fc fragment comprise a first heterodimerization mutation and a second heterodimerization mutation that promote the formation of the heterodimer from the first monomer and the second monomer, respectively. In some preferred embodiments, the first and second heterodimerization mutations comprise a combination of Knob:Hole mutations, such as the combination of mutations T366W/S354C:Y349C/T366S/L368A/Y407V.

[0232] In some preferred embodiments, the first heterodimerization mutation in the first Fc fragment includes a Knob mutation and the second heterodimerization mutation in the second Fc fragment includes a Hole mutation; alternatively, the first heterodimerization mutation in the first Fc fragment includes a Hole mutation and the second heterodimerization mutation in the second Fc fragment includes a Knob mutation.

[0233] As understood by those skilled in the art, Fc fragments suitable for the fusion protein and the dimeric molecule disclosed herein may be any antibody Fc fragment. In one embodiment, the Fc fragment of the present invention is effector function-silenced.

[0234] In one embodiment, the Fc fragment is modified in one or more properties selected from: the effector function of the Fc region and the complement activation function of the Fc region. In one embodiment, the effector function or complement activation function has been reduced or eliminated relative to a wild-type Fc region of the same isotype. In one embodiment, the effector function is reduced or eliminated by using a method selected from: reducing glycosylation of the Fc region, using an Fc isotype that naturally has a reduced or an eliminated effector function, and Fc region modification.

[0235] In one embodiment, the effector function is reduced or eliminated by reducing glycosylation of the Fc region. In one embodiment, the glycosylation of the Fc region is reduced by using a method selected from: producing the fusion protein or the dimeric molecule disclosed herein in an environment that does not allow wild-type glycosylation; removing carbohydrate groups already present in the Fc region; and modifying the Fc region so that wild-type glycosylation does not occur. In one embodiment, the glycosylation of the Fc region is reduced by using the method of modifying the Fc region so that wild-type glycosylation does not occur, e.g., including a mutation at position 297 in the Fc region so that the wild-type asparagine residue at that position is replaced with another amino acid that interferes with glycosylation at that position, e.g., an N297A mutation.

[0236] In one embodiment, the effector function is reduced or eliminated by at least one Fc region modification. In one embodiment, the at least one Fc region modification is selected from: an Fc region point mutation that impairs binding to one or more Fc receptors, selected from the following positions: 238, 239, 248, 249, 252, 254, 265, 268, 269, 270, 272, 278, 289, 292, 293, 294, 295, 296, 297, 298, 301, 303, 322, 324, 327, 329, 333, 335, 338, 340, 373, 376, 382, 388, 389, 414, 416, 419, 434, 435, 437, 438 and 439; an Fc region point mutation that impairs binding to C1q, selected from the following positions: 270, 322, 329 and 321; and an Fc region point mutation at position 132 of a CH1 domain. In one embodiment, the modification is an Fc region point mutation that impairs binding to C1q selected from the following positions: 270, 322, 329 and 321. In another embodiment, the modification is the elimination of some Fc regions.

[0237] As understood by those skilled in the art, to facilitate the formation of the heterodimer of the present invention, the Fc fragment of the dimeric molecule disclosed herein may comprise mutations that favor the dimerization of the first monomer and the second monomer. Preferably, corresponding Knob and Hole mutations are introduced into the first and second monomers based on the Knob-in-Hole technique.

[0238] Thus, in one embodiment, the dimeric molecule disclosed herein comprises:

[0239] i) a homodimeric Fc-region of the human IgG1 subclass, optionally with mutations P329G, L234A and L235A, or

[0240] ii) a homodimeric Fc-region of the human IgG4 subclass, optionally with mutations P329G, S228P and L235E, or

[0241] iii) a heterodimeric Fc-region, wherein
[0242] a) one Fc-region polypeptide comprises a mutation T366W, and the other Fc-region polypeptide comprises mutations T366S, L368A and Y407V, or
[0243] b) one Fc-region polypeptide comprises mutations T366W and Y349C, and the other Fc-region polypeptide comprises mutations T366S, L368A, Y407V and S354C, or
[0244] c) one Fc-region polypeptide comprises mutations T366W and S354C, and the other Fc-region polypeptide comprises mutations T366S, L368A, Y407V and Y349C,

[0245] or

[0246] iv) a heterodimeric Fc-region of the human IgG4 subclass, wherein both Fc-region polypeptides comprise mutations P329G, L234A and L235A, and
[0247] a) one Fc-region polypeptide comprises a mutation T366W, and the other Fc-region polypeptide comprises mutations T366S, L368A and Y407V, or
[0248] b) one Fc-region polypeptide comprises mutations T366W and Y349C, and the other Fc-region polypeptide comprises mutations T366S, L368A, Y407V and S354C, or
[0249] c) one Fc-region polypeptide comprises mutations T366W and S354C, and the other Fc-region polypeptide comprises mutations T366S, L368A, Y407V and Y349C,

[0250] or

[0251] v) a heterodimeric Fc-region of the human IgG4 subclass, wherein both Fc-region polypeptides comprise mutations P329G, S228P and L235E, and
[0252] a) one Fc-region polypeptide comprises a mutation T366W, and the other Fc-region polypeptide comprises mutations T366S, L368A and Y407V, or
[0253] b) one Fc-region polypeptide comprises mutations T366W and Y349C, and the other Fc-region polypeptide comprises mutations T366S, L368A, Y407V and S354C, or
[0254] c) one Fc-region polypeptide comprises mutations T366W and S354C, and the other Fc-region polypeptide comprises mutations T366S, L368A, Y407V and Y349C.

[0255] In some embodiments, the Fc region further comprises additional mutations that favor the purification of the heterodimer. For example, an H435R mutation (Eric J. Smith, Scientific Reports |5:17943| DOI: 10.1038/srep17943) can be introduced into one of the Fc regions of the heterodimer (e.g., an Fc region with Hole mutations) to facilitate the purification of the heterodimer using protein A. In other embodiments, for heterodimeric monomers comprising a hinge region, mutations such as C220S may also be introduced into the hinge region to facilitate the formation of the heterodimer.

[0256] As will be appreciated by those skilled in the art, linkers suitable for linking the IL-2 mutant protein and the Fc fragment in the fusion protein and dimeric molecule disclosed herein may be any linker known in the art. In some embodiments, the linker may comprise an IgG1 hinge, or may comprise a linker sequence selected from the following: (GS)n, (GSGGS)n, (GGGGS)n and (GGGS)n, wherein n is an integer of at least 1. Preferably, the linker comprises (G4S)2, i.e., GGGGSGGGGS.

[0257] Thus, in one preferred embodiment, each monomer in the dimer of the present invention comprises an IL-2 mutant protein selected from SEQ ID NOs: 37-638 (particularly SEQ ID NOs: 469-553 or 554-638, preferably SEQ ID NOs: 489, 513 and 516) linked at the C-terminus to the amino acid sequence of SEQ ID NO: 12 by a linker (G4S)2. In some preferred embodiments, the first monomer of the dimeric molecule comprises an IL-2 mutant protein selected from SEQ ID NOs: 37-638 (particularly SEQ ID NOs: 469-553 or 554-638, preferably SEQ ID NOs: 489, 513 and 516) linked at the C-terminus to the amino acid sequence of SEQ ID NO: 9 by a linker (G4S)2; and the second monomer comprises an amino acid sequence of SEQ ID NO: 10.

[0258] 3. Immunoconjugate

[0259] The present invention also provides an immunoconjugate comprising the IL2 mutant protein disclosed herein and an antigen-binding molecule. Preferably, the antigen-binding molecule is an immunoglobulin molecule, particularly an IgG molecule, an antibody, or an antibody fragment, and more particularly an Fab molecule or an scFv molecule. In some embodiments, the antigen-binding molecule specifically binds to an antigen present on a tumor cell or in tumor environment, such as an antigen selected from: fibroblast activation protein (FAP), A1 domain of tenascin-C (TNC A1), A2 domain of tenascin-C (TNC A2), extra domain B (EDB) of fibronectin, carcinoembryonic antigen (CEA), and melanoma-associated chondroitin sulfate proteoglycan (MCSP). Thus, the immunoconjugate disclosed herein can target the tumor cell or the tumor environment after being administrated to a subject, thereby providing further therapeutic benefits, such as the feasibility of treatment at lower doses and the consequent low side effects, and enhanced anti-tumor effects.

[0260] In the immunoconjugate disclosed herein, the IL-2 mutant protein disclosed herein can be linked, either directly or through a linker, to another molecule or antigen-binding molecule, and in some embodiments, a proteolytic cleavage site is provided therebetween.

[0261] 4. Polynucleotide, Vector, and Host

[0262] The present invention provides a nucleic acid encoding any of the IL-2 mutant proteins, fusion proteins, dimeric molecules or conjugates above. The polynucleotide sequence encoding the mutant protein disclosed herein can be generated by de novo solid phase DNA synthesis or by PCR mutagenesis of an existing sequence encoding the wild-type IL-2 using methods well known in the art. In addition, the polynucleotide and the nucleic acid disclosed herein may comprise a segment encoding a secretion signal peptide and are operably linked to a segment encoding the mutant protein disclosed herein so that secretory expression of the mutant protein disclosed herein can be directed.

[0263] The present invention also provides a vector comprising the nucleic acid disclosed herein. In one embodiment, the vector is an expression vector, such as a eukaryotic expression vector. The vector includes, but is not limited to, a virus, a plasmid, a cosmid, a λ phage, or a yeast artificial chromosome (YAC). In a preferred embodiment, the expression vector disclosed herein is a pYDO_017 expression vector.

[0264] In addition, the present invention also provides a host cell comprising the nucleic acid or the vector. Host cells suitable for replicating and supporting the expression of the IL-2 mutant protein, the fusion, the dimer or the immunoconjugate are well known in the art. Such cells can be transfected or transduced with a particular expression vector, and a large number of cells comprising vectors can be cultivated for inoculation in large-scale fermenters, so as to obtain sufficient IL-2 mutants, fusions, dimers or immunoconjugates for clinical application. In one embodiment, the host cell is eukaryotic. In another embodiment, the host cell is selected from a yeast cell and a mammalian cell (e.g., a CHO cell or a 293 cell). Examples of available mammalian host cell lines include SV40 transformed monkey kidney CV1 lines (COS-7), human embryonic kidney lines (293 or 293T cells, as described, for example, in Graham et al., J Gen Virol 36,59 (1977)), baby hamster kidney cells (BHK), mouse Sertoli cells (TM4 cells, as described, for example, in Mather, Biol Reprod 23,243-251 (1980)), monkey kidney cells (CV1), African green monkey kidney cells (VERO-76), human cervical cancer cells (HELA), canine kidney cells (MDCK), buffalo rat liver cells (BRL3A), human lung cells (W138), human liver cells (HepG2), mouse mammary tumor cells (MMT060562), TRI cells (as described, for example, in Mather et al., Annals N.Y. Acad Sci 383,44-68 (1982)), MRC5 cells, and FS4 cells. Other available mammalian host cell lines include Chinese hamster ovary (CHO) cells, including dhfr-CHO cells (Urlaub et al., Proc. Natl. Acad. Sci. USA 77,4216 (1980)), and myeloma cell lines such as YO, NS0, P3X63, and Sp2/0. In one embodiment, the host cell is a eukaryotic cell, preferably a mammalian cell such as a Chinese hamster ovary (CHO) cell, a human embryonic kidney (HEK) cell, or a lymphocyte (e.g., YO, NS0, and Sp20 cells).

[0265] 5. Preparation Method

[0266] In a further aspect, the present invention provides a method for preparing the IL-2 mutant protein, the fusion, the dimer or the conjugate disclosed herein, wherein the method comprises culturing a host cell comprising a nucleic acid encoding the protein, the fusion, the dimer or the conjugate under conditions suitable for expression of the IL-2 mutant protein, the fusion, the dimer or the conjugate, as provided above, and optionally isolating the protein, the fusion, the dimer or the conjugate from the host cell (or the host cell culture medium).

[0267] 6. Assay

[0268] The IL-2 mutant protein provided herein can be identified, screened, or characterized for its physical/chemical properties and/or biological activities through a variety of assays known in the art.

[0269] In one aspect, the IL-2 mutant protein disclosed herein can be tested for its binding activity to an IL-2 receptor. For example, the binding to a human IL-2Rα or β protein, IL-2Rβγ or IL-2Rαβγ can be determined by methods known in the art, such as ELISA and Western blotting, or by the exemplary methods disclosed in the examples herein. For example, the flow cytometry can be used, wherein cells such as yeast display cells that are transfected to express the mutant protein on the cell surface react with a labeled (e.g., biotin-labeled) IL-2Rα or protein, IL-2Rβγ or IL-2Rαβγ complex. Alternatively, the binding of the mutant protein to the receptor, including the binding kinetics (e.g., the K_{D} value), can be determined by a ForteBio assay in IL-2-Fc fusion or dimeric molecule form.

[0270] In a further aspect, the ability of the IL-2 mutant protein to bind to the IL-2 receptor can be measured indirectly by measuring the signaling and/or immune activation at the downstream of receptor binding.

[0271] Thus, in some embodiments, an assay for identifying the IL-2 mutant protein having a biological activity is provided. The biological activities may include, for example, the ability to induce proliferation of T cells and/or NK cells and/or Treg cells with IL-2 receptors, the ability to induce IL-2 signaling in T cells and/or NK cells and/or Treg cells with IL-2 receptors, reduced ability to induce apoptosis in T cells, the ability to induce tumor regression and/or to improve survival, and reduced in vivo toxicity properties, such as reduced vascular permeability. The present invention also provides an IL-2 mutant protein having such biological activities in vivo and/or in vitro, an Fc fusion thereof and a dimeric molecule comprising same.

[0272] Various methods known in the art can be used for determining the biological activities of the IL-2. For example, an assay suitable for testing the ability of the IL-2 mutant protein disclosed herein (e.g., in dimeric molecule form) to stimulate IFN-γ production by NK cells may comprise the steps of: incubating the cultured NK cells with the IL-2 mutant protein disclosed herein, and measuring the IFN-γ concentration in the culture medium by ELISA. IL-2 signaling induces several signaling pathways and involves JAK (Janus kinase) and STAT (signal transducers and activators of transcription) signaling molecules.

[0273] The interaction of the IL-2 with the β and γ subunits of the receptor results in phosphorylation of the receptor and JAK1 and JAK3 (which bind to the β and γ subunits, respectively). STAT5 then binds to the phosphorylated receptor and is phosphorylated on a very important tyrosine residue. This results in dissociation of STAT5 from the receptor, dimerization of STAT5, and translocation of STAT5 dimers to the nucleus where they facilitate the transcription of target genes. Thus, the ability of the mutant IL-2 polypeptide to induce signaling via the IL-2 receptor can be assessed, for example, by measuring the phosphorylation of STAT5. Details of this method have been disclosed in the examples. For example, PBMCs can be treated with the mutant IL-2 polypeptide, the fusion, the dimer or the immunoconjugate disclosed herein, and the level of phosphorylated STAT5 is determined by flow cytometry.

[0274] Furthermore, the effect of the mutant IL-2 on tumor growth and survival can be assessed in a variety of animal tumor models known in the art. For example, heterografts of cancer cell lines can be implanted into immunodeficient mice and treated with the mutant IL-2 polypeptide, the fusion, the dimer or the immunoconjugate disclosed herein. The in vivo anti-tumor effects of the mutant IL-2 polypeptide, the fusion, the dimeric molecule and the immunoconjugate disclosed herein can be determined based on tumor growth inhibition (e.g., calculated relative to an isotype control antibody). In addition, the in vivo toxicity of the mutant IL-2 polypeptide, the fusion, the dimeric molecule and the immunoconjugate disclosed herein can be determined based on changes in the body weight of animals (e.g., changes in the absolute body weight or percent changes in the body weight relative to the body weight before administration). The in vivo toxicity can also be determined based on mortality, life-time observations (visible symptoms of adverse effects, e.g., behavior, body weight, and body temperature), and clinical and anatomical pathology (e.g., measurement of blood chemistry values and/or histopathological analysis).

[0275] In a further aspect, the druggability (e.g., expression yield and product purity) of the mutant protein disclosed herein can be characterized by using methods known in the art. For the determination of the expression yield, when the mutant protein is secreted from the cultured cells and expressed in the culture supernatant, the cell culture fluid collected by centrifugation can be assayed for the protein content. Alternatively, the assay may be performed after one-step purification of the collected cell culture fluid, for example, after one-step affinity chromatography purification. For the determination of the purity of the product, the purity can be determined after one-step affinity chromatography purification of the collected culture supernatant of the production cells to determine the purification performance of the mutant protein. Preferably, the mutant protein disclosed herein, after being purified by this one-step affinity chromatography, has significantly higher purity than the wild-type protein, indicating that the mutant protein disclosed herein has a better purification performance. The purity determination method can be any conventional method known in the art, including, but not limited to, the SEC-HPLC method.

[0276] In a further aspect, the pharmacokinetic properties, e.g., half-life, of the mutant proteins, fusions, and dimeric molecules disclosed herein can be characterized by using methods known in the art.

[0277] 7. Method for Engineering IL-2 Proteins

[0278] In one aspect, the present invention provides a method for obtaining an IL-2 mutant protein with improved properties and the IL-2 mutant protein obtained by using this method.

[0279] In one embodiment, the method disclosed herein comprises the following steps:

[0280] (1) shortening a sequence of a B′C′ loop region of IL-2 by mutation, and optionally introducing one or more mutations into a binding interface of IL-2 to IL-2Rβγ and/or introducing one or more mutations into a binding interface of IL-2 to IL-2Rα; and

[0281] (2) expressing the IL-2 mutant protein in a mammalian cell (e.g., an HEK293 or CHO cell), for example, in the form of an Fc fusion (e.g., an FcLALA fusion).

[0282] In yet another embodiment, the method disclosed herein comprises the following steps:

[0283] (1) introducing one or more mutations into a binding interface of IL-2 to IL-2Rβγ, and optionally shortening a sequence of a B′C′ loop region of IL-2 by mutation and/or introducing one or more mutations into a binding interface of IL-2 to IL-2Rα; preferably in one embodiment, not introducing a mutation into the binding interface of IL-2 to IL-2Rα; and

[0284] (2) expressing the IL-2 mutant protein in a mammalian cell (e.g., an HEK293 or CHO cell), for example, in the form of an Fc fusion (e.g., an FcLALA fusion).

[0285] In any of the above embodiments, preferably, the shortened loop region has less than 10, 9, 8, 7, 6 or 5 amino acids in length, and more preferably has 7 amino acids in length;

[0286] more preferably, the B′C′ loop region mutation includes:

[0287] (a) a substitution of aa74 to aa83 in a B′C′ loop region, for example, with a short B′C′ loop sequence from four-helical short-chain cytokine IL family members, such as a B′C′ loop sequence from IL-15, preferably, with a sequence GDASIH; or

[0288] (b) a truncation of aa74 to aa83 in the B′C′ loop region, for example, by 1, 2, 3 or 4 amino acids at the C-terminus; preferably a truncation to form a sequence (Q/G)SKN(F/I)H, and more preferably a truncation to form a sequence selected from the following:

B′C′ loop sequence
QSKNFH
GSKNFH
QSANFH
QSANIH

[0289] preferably, the IL-2Rβγ binding interface mutation includes the IL-2Rβγ binding interface mutation described above;

[0290] preferably, the IL-2Rα binding interface mutation includes the IL-2Rα binding interface mutation described above;

[0291] preferably, the mutant protein has the following improved properties: (i) improved expression yield and/or protein purity (e.g., purity after one-step affinity chromatography as determined by SEC-HPLC); and optionally (ii) weakened binding to IL2Rβ and/or (iii) altered binding to IL-2Rα.

[0292] In one embodiment, the method of the present invention further comprises the following steps: after steps (1) and (2), identifying the following properties of the mutant protein: (i) the expression yield and/or protein purity after purification (e.g., purity after one-step affinity chromatography as determined by SEC-HPLC); and optionally (ii) the weakened binding to IL2Rβ, and/or (iii) the altered binding to IL-2Rα. In yet another embodiment, the method of the present invention further comprises the following steps: after steps (1) and (2), identifying the following properties of the mutant protein: (i) the expression yield and/or protein purity after purification (e.g., purity after one-step affinity chromatography as determined by SEC-HPLC); and (ii) the weakened binding to IL2Rβ, and optionally the maintained binding to IL-2Rα.

[0293] In one embodiment, the method comprises: identifying the IL-2 mutation that improves druggability (e.g., expression yield and/or product stability and/or homogeneity, such as one-step Fc affinity chromatography purity) before the combination of mutations in step (1) is performed. In one preferred embodiment, the druggability of the mutant protein is improved by substituting the B′C′ loop with a shortened B′C′ loop or truncating the B′C′ loop to form a shortened B′C′ loop.

[0294] In one embodiment, the method comprises: identifying the IL-2Rβγ binding interface mutation and/or IL-2Rα binding interface mutation that impart weakened binding to IL2Rβ and/or an altered ability to bind to IL-2Rα relative to the wild-type IL-2 before the combination of mutations in step (1) is performed.

[0295] As will be appreciated by those skilled in the art, these mutations can be combined with mutations imparting further improved druggability or other improved properties to obtain an IL-2 mutant protein with multiple improved properties.

[0296] In one embodiment, the combination of an (e.g., known) IL-2Rβγ binding interface mutation that results in weakened binding to IL-2Rβγ and a (e.g., known) B′C′ loop region mutation that improves the druggability is introduced into the IL-2 protein, and the properties are identified. In one preferred embodiment, the identification includes weakened binding to IL-2Rβγ and improved druggability (e.g., improved expression and/or purity, and/or product stability and/or homogeneity), and optionally substantially unchanged or weakened or enhanced binding affinity for IL-2Rα, relative to the wild-type IL-2.

[0297] In some embodiments, the parental wild-type IL-2 protein used as a mutation template preferably has at least 85%, or at least 90% or 95% identity to SEQ ID NO: 1, and more preferably is an IL-2 protein derived from human.

[0298] 8. Pharmaceutical Composition and Pharmaceutical Preparation

[0299] The present invention also comprises a composition (including a pharmaceutical composition or a pharmaceutical preparation) comprising the IL-2 mutant protein or the fusion, dimeric molecule or immunoconjugate thereof, and a composition comprising the polynucleotide encoding the IL-2 mutant protein or the fusion, dimeric molecule or immunoconjugate thereof. Such compositions can further optionally comprise suitable pharmaceutical adjuvants, such as a pharmaceutical carrier and a pharmaceutical excipient known in the art, including buffers.

[0300] 9. Combination Product

[0301] In one aspect, the present invention further provides a combination product comprising the mutant protein or the fusion, dimeric molecule or immunoconjugate thereof disclosed herein, and one or more other therapeutic agents (e.g., a chemotherapeutic agent, other antibodies, a cytotoxic agent, a vaccine, and an anti-infective active agent). The combination product disclosed herein can be used in a therapeutic method disclosed herein.

[0302] In some embodiments, the present invention provides a combination product, wherein the aforementioned other therapeutic agents refer to, for example, a therapeutic agent, such as an antibody, which is effective to stimulate an immune response and thus further enhance, stimulate or upregulate the immune response in a subject.

[0303] In some embodiments, the combination product is used for preventing or treating cancer. In some embodiments, the cancer is, e.g., a gastrointestinal cancer, e.g., rectal cancer, colon cancer, or colorectal cancer. In some embodiments, the combination product is used for preventing or treating an infection, such as bacterial infection, viral infection, fungal infection, and protozoal infection.

[0304] 10. Therapeutic Method and Use

[0305] As used herein, the terms “individual” and “subject” are used interchangeably and refer to a mammal. Mammals include, but are not limited to, domesticated animals (e.g., cows, sheep, cats, dogs, and horses), primates (e.g., humans and non-human primates such as monkeys), rabbits, and rodents (e.g., mice and rats). In particular, a subject is a human.

[0306] As used herein, the term “treating” refers to a clinical intervention intending to alter the natural progress of a disease in an individual being treated. Desired therapeutic effects include, but are not limited to, preventing the occurrence or recurrence of diseases, alleviating symptoms, reducing any direct or indirect pathological outcomes of diseases, preventing metastasis, delaying disease progression, improving or alleviating conditions, and alleviating or improving prognosis.

[0307] In one aspect, the present invention provides a method for stimulating the immune system of a subject, comprising administering to the subject an effective amount of a pharmaceutical composition comprising the IL-2 mutant protein, the fusion, the dimeric molecule or the immunoconjugate disclosed herein.

[0308] The weakened IL-2-Fc molecule of the present invention can effectively avoid excessive release of inflammatory factors caused by strong agonizing of lymphocytes, and has more stable and long-acting pharmacokinetic properties. Thus, in one embodiment, a sufficiently high drug exposure can be achieved in the human body with a lower single dose to avoid drug-related toxicity resulting from high Cₘₐₓ.

[0309] Thus, in some embodiments, the present invention relates to a method for enhancing the immune response of the body of a subject, comprising administering to the subject an effective amount of any of the IL-2 mutant proteins or the fusions or immunoconjugates thereof described herein. In some embodiments, the IL-2 mutant protein or the fusion or immunoconjugate thereof disclosed herein is administered to a subject with a tumor to stimulate an anti-tumor immune response. In other embodiments, the antibodies or the antigen-binding fragments thereof disclosed herein are administered to a subject with an infection to stimulate an anti-infection immune response.

[0310] In another aspect, the present invention relates to a method for treating a disease, such as cancer, in a subject, wherein the method comprises administering to the subject an effective amount of any of the IL-2 mutant proteins or the fusions or immunoconjugates thereof described herein. The cancer may be at an early, intermediate or advanced stage, or may be a metastatic cancer. In some embodiments, the cancer may be, e.g., a gastrointestinal cancer, e.g., rectal cancer, colon cancer, or colorectal cancer.

[0311] In another aspect, the present invention relates to a method for treating an infectious disease, e.g., chronic infection, in a subject, wherein the method comprises administering to the subject an effective amount of any of the IL-2 mutant proteins or the fragments thereof, or an immunoconjugate, a multispecific antibody, or a pharmaceutical composition comprising the antibodies or the fragments described herein. In one embodiment, the infection is virus infection.

[0312] In another aspect, the present invention relates to a method for treating a disease associated with Treg regulation in a subject, wherein the method comprises administering to the subject an effective amount of any of the IL-2 mutant proteins or the fragments thereof, or an immunoconjugate, a multispecific antibody, or a pharmaceutical composition comprising the antibodies or the fragments described herein. In one embodiment, the disease is associated with IL-2-mediated immune downregulation via Treg cells. In one embodiment, the disease is an autoimmune disease.

[0313] The mutant protein disclosed herein (or the pharmaceutical composition comprising the same, or the fusion, dimeric molecule or immunoconjugate thereof, and optionally an additional therapeutic agent) can be administered by any suitable method, including parenteral administration, intrapulmonary administration, intranasal administration, and, if required by locoregional treatment, intralesional administration. Parenteral infusion includes intramuscular, intravenous, intra-arterial, intraperitoneal or subcutaneous administration. The administration is carried out by any suitable means, such as injection, e.g., intravenous or subcutaneous injection, to some extent depending on whether the treatment is short-term or long-term. Various administration schedules are encompassed herein, including, but not limited to, single administration or multiple administrations at multiple time points, bolus injection, and pulse infusion.

[0314] In order to prevent or treat a disease, the appropriate dosage of the mutant protein disclosed herein (used alone or in combination with one or more additional therapeutic agents) will depend on the type of the disease to be treated, the type of the antibody, severity and progression of the disease, the purpose for which the antibody is administered (prevention or treatment), previous treatments, clinical history of a patient, responses to the antibody, and the discretion of an attending physician. The antibody is suitably administered to a patient through a single treatment or through a series of treatments.

[0315] In a further aspect, the present invention also provides use of the IL-2 mutant protein, composition, immunoconjugate, fusion and dimeric molecule disclosed herein in preparation of a drug for use in the aforementioned method (e.g., for treatment).

[0316] The following examples are described to assist in understanding the present invention. The examples are not intended to be and should not be interpreted in any way as limiting the protection scope of the present invention.

### EXAMPLES

### Example 1: Design and Construction of IL-2Rα Binding Interface Mutant of Interleukin-2

[0317] Design and Construction of an Interleukin-2 Mutant Library

[0318] Design of a Mutant Library

[0319] According to the crystal structure (PDB: 1Z92) (as shown in FIG. 1) of the complex of interleukin-2 (referred to as IL-2) and its alpha receptor CD25 (referred to as IL-2Rα), the listed IL-2 residues at interaction sites were mutated as per Table 1. The wild-type IL-2 (UniProt: P60568, aa21-153, C125S, referred to as IL-2^{WT}) was used as a template for mutant library construction. According to the 50% original amino acids contained in each site, the remaining 50% was evenly shared by the “mutant amino acids” in Table 1. A yeast-based IL-2^{mutant} display library was designed and produced for the binding site of IL-2 to IL-2Rα and designated IBYDL029 (Innoventbio Yeast Display Library). The library was screened for IL-2 mutants that did not bind to IL-2Rα by flow cytometry FACS.

TABLE 1
Mutation sites for the IBYDL029 library

| Sites | Amino acid residues | Mutant amino acids | Diversity |
|---|---|---|---|
| 35 | Lys(K) | D, E | 3 |
| 37 | Thr(T) | D, E, R, K, F, Y, W | 8 |
| 38 | Arg(R) | D, E, F, Y, W, A, V | 8 |
| 41 | Thr(T) | K, R, M, F, Y, W, Q, E | 9 |
| 42 | Phe(F) | K, R, A, E, Q | 6 |
| 43 | Lys(K) | E, D, F, Y, W | 6 |
| 45 | Tyr(Y) | R, K | 3 |
| 61 | Glu(E) | R, K, W, Y, L | 6 |
| 62 | Glu(E) | R, K, W, Y, L | 6 |
| 68 | Glu(E) | R, K, W, Y | 5 |
| 72 | Leu(L) | R, K, F, Y, W | 6 |

[0320] The sequence of IL-2^{WT} was set forth in SEQ ID NO: 1 in the present application. A C125S mutation was introduced at position 125 of the sequence to avoid the formation of a disulfide-bridged IL-2 dimer.

[0321] According to existing literature, the IL-2 mutant IL-2^{3X} does not bind to IL-2Rα, and has unchanged binding to IL-2Rβ (Rodrigo Vazquez-Lombardi et al., Nature Communications, 8:15373, DOI: 10.1038/ncomms15373). IL-2^{3X} was displayed on the surface of yeasts and used as a control. The sequence of IL-2^{3X} was set forth in SEQ ID NO: 4. Similar to IL-2^{WT}, the protein also comprised a C125S mutation.

[0322] Identification of IL-2Rα Binding Interface Mutants

[0323] Expression and Purification of IL-2 Receptors

[0324] Vector Construction

[0325] An avi tag (GLNDIFEAQKIEWHE, the tag peptide can be biotinylated under BirA enzyme catalysis) and 6 histidine tags (HHHHHH) were linked to the C-terminus of the sequences of the IL-2 receptors IL-2Rα (UniProt: P01589, aa22-217) and IL-2Rβ (UniProt: P14784, aa27-240), which were constructed separately into pTT5 vectors (Addgene). The sequences of the receptors constructed were set forth in SEQ ID NOs: 5 and 6.

[0326] The IL-2 receptor βγ complex was an Fc heterodimer based on Knobs in holes. The sequence of IL-2Rβ was constructed into the N-terminus of Fc-Knob (SEQ ID NO: 7), and the sequence of IL-2Rγ was constructed into the N-terminus of Fc-Hole (SEQ ID NO: 8). They were constructed separately into pcDNA3.1 vectors, then co-transfected into Expi293 cells and expressed.

[0327] Plasmid Transfection

[0328] Expi293 cells (Invitrogen) were passaged according to a desired transfection volume. The cell density was adjusted to 1.5×10⁶ cells/mL the day before transfection. The cell density on the day of transfection was approximately 3×10⁶ cells/mL. 1/10 (v/v) of the final volume of Opti-MEM medium (Gibco, Catalog No. 31985-070) was taken as a transfection buffer, added with expression plasmids constructed as described above, mixed well, and filtered with a 0.22 μm filter for later use. An appropriate amount of polyethylenimine (PEI) (Polysciences, 23966) was added to the plasmids from the previous step (the mass ratio of plasmids to PEI was 1:3), mixed and incubated at room temperature for 10 min to give a DNA/PEI mixture. The DNA/PEI mixture was gently poured into HEK293 cells, mixed well, and cultured at 37° C., 8% CO₂ for 24 h, followed by the addition of VPA (Sigma, Catalog No. P4543-100G) to reach a final concentration of 2 mM. Then 2% (v/v) Feed (1 g/L Phytone Peptone+1 g/L Difco Select Phytone) was added and the resulting mixture was cultivated for another 6 days.

[0329] Purification of IL-2Rα-His and IL-210-His Proteins

[0330] Before purification, the collected cultures were centrifuged at 4500 rpm for 30 min, and the cells were discarded. The supernatant was filtered through a 0.22 μm filter. A nickel column (5 mL Histrap excel, GE, 17-3712-06) used for purification was soaked with 0.1 M NaOH for 2 h, and then washed with 5-10 column volumes of ultra-pure water to remove alkali liquor. The column was equilibrated with 5 column volumes of binding buffer (20 mM Tris pH 7.4, 300 mM NaCl) before purification. The cell supernatant was passed through the equilibrated column and then 10 column volumes of wash buffer (20 mM Tris 7.4, 300 mM NaCl, 10 mM imidazole) was loaded on the column to remove non-specific binding impurity proteins. The target protein was then eluted with 3-5 column volumes of eluent (20 mM Tris 7.4, 300 mM NaCl, 100 mM imidazole). The collected protein was buffer-exchanged into PBS (Gibco, 70011-044) by ultrafiltration concentration, and further separated and purified using superdex200 increase (GE, 10/300GL, 10245605). The elution peak of the monomer was collected, and the equilibration buffer and elution buffer for the column were PBS (Gibco, 70011-044). 100 μg of the purified protein sample was taken and the protein purity was determined using a gel filtration column SW3000 (TOSOH Catalog No. 18675).

[0331] Purification of IL-2 Receptor βγ Protein

[0332] After culture, the mixture was centrifuged at 13000 rpm for 20 min, and the supernatant was collected and purified by a pre-packed column Hitrap Mabselect Sure (GE, 11-0034-95). The procedures were as follows: the packing column was equilibrated with 5 column volumes of equilibration buffer (0.2 M Tris, 1.5 M NaCl, pH 7.2) before purification; the collected supernatant was passed through the column, and then the column was washed with 10 column volumes of equilibration buffer to remove non-specific binding proteins; the packing was washed with 5 column volumes of elution buffer (1 M sodium citrate, pH 3.5), and the eluent was collected. The collected protein was buffer-exchanged into PBS (Gibco, 70011-044) by ultrafiltration concentration, and further separated and purified using superdex200 increase (GE, 10/300GL, 10245605). The elution peak of the monomer was collected, and the equilibration buffer and elution buffer for the column were PBS (Gibco, 70011-044). 100 μg of the purified protein sample was taken and the protein purity was determined using a gel filtration column SW3000 (TOSOH Catalog No. 18675).

[0333] Biotin Labeling of IL-2Rα, IL-2Rβ and IL-2Rβγ Proteins

[0334] Biotin labeling was performed using an enzymatic method, of which the procedures were as follows: an appropriate amount of each of the solutions of the IL-2Rα, IL-2Rβ and IL-2Rβγ proteins expressed and purified above was added with 1/10 (m/m) mass of His-BirA protein (UniProt: P06709), followed by ATP (Sigma, Catalog No. A2383-10G) with a final concentration of 2 mM, MgCl₂ with a final concentration of 5 mM, and D-biotin (AVIDITY, Catalog No. K0717) with a final concentration of 0.5 mM; the mixtures were incubated at 30° C. for 1 h, and purified by Superdex200 increase (GE, 10/300GL, 10245605) to remove excess biotin and His-BirA; the purified samples were verified by Streptavidin (SA) sensor (PALL, 18-5019) from Fortebio to confirm the successful biotin labeling.

[0335] Expression, Purification and Identification of IL-2^{mutant}-FC Fusion Protein

[0336] Construction of Expression Plasmids

[0337] The yeast-based IL-2^{mutant} display library IBYDL029 was screened by flow cytometry FACS for an IL-2^{mutant} that did not bind to IL-2Rα. The IL-2^{mutant} sequence obtained from the library screening was linked to FcLALA via two GGGGS and constructed into a vector of pCDNA3.1 (Addgene) to express the IL-2^{mutant}-FC fusion protein. In addition, as controls, IL-2^{WT} and IL-2^{3X} gene sequences were linked to FcLALA via two GGGGS and constructed into pCDNA3.1 to express the IL-2^{WT}-FC and IL-2^{3X}-FC fusion proteins. The Fc used in this example was the Fc of human IgG1 with the mutations L234A and L235A (referred to as FcLALA, SEQ ID NO: 12).

[0338] Expression and Purification of Fusion Proteins of IL-2 and FC

[0339] A vector containing the gene encoding the fusion protein was transferred into HEK293 cells using a chemical transfection method. The cultured HEK293 cells were transiently transfected using chemical transfection reagent PEI according to a scheme provided by the manufacturer. First, the plasmid DNA and the transfection reagent were prepared in a superclean bench. 3 mL of Opti-MEM medium (Gibco, Catalog No. 31985-070) was added to a 50 mL centrifuge tube, followed by 30 μg of the corresponding plasmid DNA. The Opti-MEM medium containing the plasmid was filtered with a 0.22 μm filter, and then added with 90 μg of PEI (1 g/L), and the mixture was let stand for 20 min. The DNA/PEI mixture was gently poured into 27 mL of HEK293 cells, mixed well, and cultured at 37° C. with 8% CO₂ for 20 h, followed by the addition of VPA to reach a final concentration of 2 mM. Then 2% (v/v) of Feed was added, and the resulting mixture was cultured for another 6 days.

[0340] After culture, the mixture was centrifuged at 13000 rpm for 20 min, and the supernatant was collected, and purified by pre-packed column Hitrap Mabselect Sure. The procedures were as follows: the packing column was equilibrated with 5 column volumes of equilibration buffer (0.2 M Tris, 1.5 M NaCl, pH 7.2) before purification; the collected supernatant was passed through the column, and then the column was washed with 10 column volumes of equilibration buffer to remove non-specific binding proteins; the packing was washed with 5 column volumes of elution buffer (1 M sodium citrate, pH 3.5), and the eluent was collected; 80 μL of Tris (2 M Tris) was added per 1 mL of eluent, and the mixture was buffer-exchanged into PBS using an ultrafiltration concentration tube, and then the concentration was determined. 100 μg of purified protein was taken with its concentration adjusted to 1 mg/mL. The purity of IL-2-Fc dimer protein was determined by gel filtration chromatography. The results are shown in Table 2. The sequences of the IL-2 mutants of the present invention listed in Table 2 are shown in FIG. 3.

TABLE 2
Expression yield and purity of IL-2-FC in 293 cells

| IL-2 | Expression yield (mg/L) | Purity (SEC-HPLC) |
|---|---|---|
| IL-2^{WT} | 18 | 45% |
| Mutant IL-2^{3X} | 34 | 70% |
| Mutant Y29A2 | 37 | 79% |
| Mutant Y29A5 | 12 | 73% |
| Mutant Y29A6 | 1 | 37% |
| Mutant Y29B2 | 77 | 88% |
| Mutant Y29C5 | 10 | 60% |
| Mutant Y29D2 | 17 | 80% |
| Mutant Y29D6 | 23 | 60% |
| Mutant Y30B1 | 20 | 70% |
| Mutant Y30E1 | 60 | 78% |

[0341] Determination of Affinity of IL-2^{mutant}-FC Fusion Proteins for their Receptors

[0342] The equilibrium dissociation constants (K_{D}) for binding of the IL-2^{mutant}-FC fusion proteins of the present invention to their receptors were measured by bio-layer interferometry (ForteBio).

[0343] The ForteBio affinity assay was conducted according to the method (Estep, P et al., High throughput solution Based measurement of antibody-antigen affinity and epitope binding. mAbs, 2013.5(2): p. 270-8) known in the art. Briefly, the affinity of candidate IL-2^{mutant}-FC for each of IL-2Rα and IL-2Rβ was measured as follows: a sensor was equilibrated offline in an assay buffer for 20 min and equilibrated online for 120 s to establish a baseline; the human biotin-labeled IL-2Rα or IL-2Rβ was loaded onto an SA sensor (PALL, 18-5019) for ForteBio affinity assay; the sensor loaded with the biotin-labeled IL-2Rα or IL-2Rβ was placed into a solution containing 100 nM IL-2^{mutant}-FC until to a plateau, and then transferred to an assay buffer for dissociation for at least 2 min to measure the association and dissociation rates. The kinetic analysis was performed using a 1:1 binding model.

[0344] In the assay described above, the affinity K_{D} values of IL-2^{mutant}-FC fusion proteins expressed by HEK293-F cells for their receptors are shown in Table 3. As a control, the affinity K_{D} values of the IL-2^{WT}-FC and IL-2^{3X}-FC fusion proteins measured using the same method are also shown in Table 3.

TABLE 3
Affinity K_{D} values of IL-2^{mutant}-FC
fusion proteins for their receptors

| IL-2 | IL-2Rα avidity | IL-2RP avidity |
|---|---|---|
| IL-2^{WT} | 1.0E−08 | 4.1E−08 |
| IL-2^{3X} | N.B | 1.6E−08 |
| Y29A2 | Very weak | 4.8E−10 |
| Y29A5 | N.B | 3.4E−10 |
| Y29A6 | N.B | 1.8E−09 |
| Y29B2 | N.B | 3.4E−10 |
| Y29C5 | N.B | 4.2E−10 |
| Y29D2 | Very weak | 8.5E−11 |
| Y29D6 | N.B | 1.9E−10 |
| Y30B1 | N.B | 1.9E−10 |
| Y30E1 | N.B | 5.9E−09 |

N.B: none binding

[0345] It can be seen from the affinity data, the binding of all of the above mutants obtained from the library IBYDL029 to IL-2Rα was blocked.

### Example 2: Construction, Screening and Identification of IL-2 Chimeric and Truncated Mutants

[0346] Design of an IL-2 B′C′ Loop Chimera and an IL-2 B′C′ Loop Truncate

[0347] B′C′ loop: The linker sequence (FIG. 2A) of the B helix and C helix of the IL-2, comprising 11 amino acids, namely A73-R83.

[0348] By comparing the crystal structure of an IL-2 monomer (PDB: 1M47) with that of a complex (PDB: 2ERJ), it was found that the B′C′ loop was absent from the crystal structure of the IL-2 monomer since it was very active in a solution and could not form a relatively stable conformation.

[0349] By genetically engineering the B′C′ loop, the stability of the B′C′ loop, and thus that of the IL-2, was increased. We therefore observed the crystal structure of the human IL-15 (PDB: 2Z3Q) and found that its B′C′ loop was relatively short and stable (FIG. 2B). Therefore, we designed an IL-2 chimeric molecule (L017) and 4 truncated molecules (L057-L060) (see Table 4).

TABLE 4
Optimized sequences of IL-2 B′C′ loop

| Name | B′C′ loop sequence |
|---|---|
| L 001 (IL-2^{WT}) | AQSKNFHLRPR |
| L 017(IL-2^{hyb15BCL}) | SGDASIH |
| L 057(IL-2^{truncate1}) | AQSKNFH |
| L 058(IL-2^{truncate2}) | AGSKNFH |
| L 059(IL-22^{truncate3}) | AQSANFH |
| L 060(IL-22^{truncate4}) | AQSANIH |

[0350] Construction of Expression Plasmids

[0351] The wild-type IL-2 (UniProt: P60568, aa21-153, C125S, IL-2^{WT}for short), the IL-2 mutant IL-2^{3X} (R38D, K43E, E61R), and the B′C′ loop chimeras and truncates were linked to the Fc of human IgG1 (L234A, L235A, FcLALA for short, SEQ ID NO: 12) via a GSGS linker sequence and constructed into pTT5 vectors to express the following proteins:

| Protein | Structure | SEQ ID NOs |
|---|---|---|
| Y001 | IL-2^{WT}-GSGS-FcLALA | SEQ ID NO: 13 |
| Y002 | IL-2^{.3X}-GSGS-FcLALA | SEQ ID NO: 14 |
| Y017 | IL-2^{hyb15BCL}-GSGS-FcLALA | SEQ ID NO: 15 |
| Y057 | IL-2^{truncate1}-GSGS-FcLALA | SEQ ID NO: 16 |
| Y058 | IL-2^{truneate2}-GSGS-FcLALA | SEQ ID NO: 17 |
| Y059 | IL-2^{truneate3}-GSGS-FcLALA | SEQ ID NO: 18 |
| Y060 | IL-2^{truncate4}-GSGS-FcLALA | SEQ ID NO: 19 |

[0352] The B′C′ loop chimera (Y017) or truncate (Y057), combined with the mutant Y30E1 (K35E, T37E, R38E, F42A) obtained by library screening, was linked to FcLALA via two GGGGS and constructed into pCDNA3.1 vectors to express the following proteins. Among them, Y092 had a chimeric B′C′ loop sequence AGDASIH; Y144 had an additional T3A amino acid substitution on the basis of Y092, which was intended to remove the O-glycosylation at the N-terminus of IL-2.

| Protein | Structure | SEQ ID NOs |
|---|---|---|
| Y089 | IL-2^{.Y30E1.truncate1}-2*(G4S)-FcLALA | SEQ ID NO: 20 |
| Y092 | IL-2^{.Y30E1.15BCL}-2*(G4S)-FcLALA | SEQ ID NO: 21 |
| Y144 | IL-2^{.Y30E1.15BCL.T3A}-2*(G4S)-FcLALA | SEQ ID NO: 22 |

[0353] Moreover, the IL-2^{WT} and the IL-2^{3X} were linked to FcLALA via two GGGGS and constructed into pCDNA3.1 vectors to express the following proteins:

| Protein | Structure | SEQ ID NOs |
|---|---|---|
| Y040 | IL-2^{.3X}-2*(G4S)-FcLALA | SEQ ID NO: 23 |
| Y045 | IL-2^{WT}-2*(G4S)-FcLALA | SEQ ID NO: 24 |

[0354] The specific sequence information of the above protein molecules is shown in the sequence listing.

[0355] Expression and Purification of Fusion Proteins

[0356] The above protein molecules were expressed in 293 cells and CHO cells, respectively. The expression in HEK293 cells was performed by using the method for expressing IL-2-Fc fusion proteins in Example 1. The expression in CHO cells was performed as follows.

[0357] ExpiCHO cells (Invitrogen) were passaged according to a desired cell volume. The cell density was adjusted to 3.5×10⁶ cells/mL the day before transfection. The cell density (about 8-10×10⁶ cells/mL) was measured on the day of transfection. The viability reached 95% or more. The cell density was adjusted to 6×10⁶ cells/mL using ExpiCHO™ Expression Medium (Gibco, Catalog No. A29100-01). OptiPRO™ SFM (Gibco, Catalog No. 12309-019) at a final volume of 8% (v/v) was taken as a transfection buffer. A corresponding amount (0.8 μg/mL cell) of plasmid was added, and the mixture was well mixed and filtered through a 0.22 μm filter membrane to remove the bacteria. The reagent in ExpiFectamine™ CHO Transfection Kit (Gibco, Catalog No. A29130) was added in a cell ratio of 3.2 μL/mL. The complex formed with transfection reagent and the plasmid DNA was incubated at room temperature for 1-5 min, and slowly added to the cells. The cells were cultured at 37° C. with 8% CO₂ for 18 h, and then 0.6% (v/v) Enhancer and 30% (v/v) Feed were added. The cells were cultured for another 6 days.

[0358] After culture, the cell culture fluid was centrifuged at 13000 rpm for 20 min, and the supernatant was collected and purified by a pre-packed column Hitrap Mabselect Sure (GE, 11-0034-95). The procedures were as follows: the packing column was equilibrated with 5 column volumes of equilibration buffer (20 mM Tris, 150 mM NaCl, pH 7.2) before purification; the collected supernatant was passed through the column, and then the column was washed with 10 column volumes of equilibration buffer to remove non-specific binding proteins; the packing was washed with 5 column volumes of elution buffer (100 mM sodium citrate, pH 3.5), and the eluent was collected. 80 μL of Tris (2 M Tris) was added per 1 mL of eluent, and the mixture was buffer-exchanged into PBS (Gibco, Catalog No. 70011-044) using an ultrafiltration concentration tube (MILLIPORE, Catalog No. UFC901096), and then the concentration was determined. 100 μg of purified protein was taken with its concentration adjusted to 1 mg/mL. The protein purity was determined by gel filtration column SW3000 (TOSOH Catalog No. 18675).

[0359] The fusion proteins of the B′C′ loop chimera (Y017) and truncate (Y057/058/059) had greatly improved expression yields and one-step affinity chromatography purity in HEK293 cells compared to the wild-type IL-2 fusion protein (Y001). The results are shown below in Table 5.

TABLE 5
Expression yield and purity of IL-2 mutants in HEK293

| Protein | Expression yield (mg/L) | Purity (SEC-HPLC) |
|---|---|---|
| Y001 | 16.35 | 44.74% |
| Y002 | 23.92 | 69.85% |
| Y017 | 54.47 | 93.45% |
| Y057 | 52.36 | 92.77% |
| Y058 | 49.86 | 99.09% |
| Y059 | 36.52 | 86.95% |
| Y060 | 21.20 | 66.33% |

[0360] The fusion proteins comprising the B′C′ loop chimeras (Y092 and Y144), truncate (Y089) and further mutant Y30E1 also had greatly improved expression yields and one-step affinity chromatography purity in CHO cells compared to the wild-type IL-2 fusion protein (Y045). The results are shown below in Table 6.

TABLE 6
Expression yield and purity of IL-2 mutants in CHO

| Protein | Expression yield (mg/L) | Purity (SEC-HPLC) |
|---|---|---|
| Y040 | 20.28 | 40.75% |
| Y045 | 2.44 | 50.85% |
| Y089 | 249.6 | 99.11% |
| Y092 | 118.8 | 99.07% |
| Y144 | 114 | 97.78% |

[0361] According to the above data, it can be seen that: 1) the point mutation molecules such as Y30E1 obtained by yeast library screening could block the binding to IL-2Rα; 2) the B′C′ loop chimeric molecule and truncate molecule improved the molecule expression yield and purity; 3) the combination molecules of Y30E1 and the B′C′ loop mutant achieved the blocking of IL-2Rα and also the improved molecule expression yield and purity.

[0362] In Vitro Functional Assays of Mutants

[0363] The activation effect of each mutant on CD25⁺ cells and CD25⁻ cells was tested by detecting the activation effect of each IL-2^{mutant}-FC on p-STAT5 signals of primary human CD8⁺ T cells. The specific steps are as follows:

[0364] 1. Thawing PBMC Cells:

[0365] a) PBMC cells (Allcells, Catalog No. PB005F, 100M package) were taken out from liquid nitrogen, and then rapidly placed in a 37° C. water bath for thawing;

[0366] b) the cells were added to 10 mL of preheated X-VIVO15 (Lonza, Catalog No. 04-418Q) culture medium containing 5% human AB serum (GemCell, Catalog No. 100-512) and 1‰ DNase (STRMCELL, Catalog No. 07900), centrifuged at 400 G and 25° C. for 10 min (the subsequent centrifugation was under the same condition) and washed once;

[0367] c) 20 mL of culture medium was added to resuspend the cells, and the cells were cultured overnight in a 37° C. carbon dioxide incubator.

[0368] 2. Purifying Human CD8⁺ T Cells:

[0369] a) the cell suspension obtained in step 1 was pipetted, and after centrifugation, the supernatant was discarded;

[0370] b) a mixture of 1 mL of Robosep buffer (STEMCELL, Catalog No. 20104), 100 μL of human AB serum, and 100 μL of negative screening antibody in human CD8⁺ T cell purification kit (Invitrogen, Catalog No. 11348D) was added to resuspend the cells;

[0371] c) after mixing well, the cells were incubated for 20 min at 4° C. and shaken every 5 min;

[0372] d) after incubation, 10 mL of Robosep buffer was added, and the cells were centrifuged and washed twice;

[0373] e) meanwhile, 1 mL of magnetic microspheres (human CD8⁺ T cell purification kit) was taken, and 7 mL of Robosep buffer was added; the mixture was placed on a magnetic frame for 1 min to discard the supernatant, and the magnetic microspheres were pre-washed;

[0374] f) the microspheres and the cells were resuspended with 1 mL of Robosep buffer, and after mixing well, the mixture was subjected to rotary incubation for 30 min at room temperature;

[0375] g) after incubation, 6 mL of Robosep buffer was added and the mixture was placed on a magnetic frame for 1 min, followed by the collection of the supernatant;

[0376] h) the collected liquid was placed on the magnetic frame for 1 min, and the supernatant was collected;

[0377] i) centrifugation was performed to discard the supernatant, the cells were resuspended using a preheated T culture medium, and the cell density was adjusted to 1×10⁶/mL;

[0378] j) 1/3 of the cells were taken to stimulate the expression of CD25 later, and the remaining cells were placed in a 37° C. carbon dioxide incubator for static culture overnight.

[0379] 3. Stimulating CD8⁺ T Cells to Express CD25:

[0380] a) 1/3 of the CD8⁺ T cells purified in step 2 were taken, into which magnetic microspheres of an anti-human CD3/CD28 antibody (GIBCO, Catalog No. 11131D) were added (the ratio of cells to microspheres was 3:1);

[0381] b) the mixture was placed in a 37° C. carbon dioxide incubator for static culture for three days;

[0382] c) 10 mL of culture medium was added to wash the cells twice;

[0383] d) the culture medium was added to adjust the cell density to 1×10⁶/mL, and the cells were placed in a 37° C. carbon dioxide incubator for static culture for 2 days.

[0384] 4. Detecting the Purity and Expression Level of the Cells:

[0385] a) an anti-human CD8-PE antibody (Invitrogen, Catalog No. 12-0086-42), an anti-human CD25-PE antibody (eBioscience, Catalog No. 12-0259-42), and an isotype control antibody (BD, Catalog No. 556653) were adopted to detect CD8 and CD25 of the cells;

[0386] b) the cells in step 2 were CD8⁺ CD25⁻ T cells, and the cells in step 3 were CD8⁺ CD25⁺ T cells.

[0387] 5. Detecting the EC₅₀ Value of each IL-2^{mutant}-FC in Activating p-STAT5 Signals in CD8⁺ CD25⁻ T Cells:

[0388] a) CD8⁺ CD25⁻ T cells were added to 96-well U-bottom plates (Costar, Catalog No. CLS3799-50EA) at 1×10⁵ cells per well;

[0389] b) the IL-2^{mutant}-FC, the commercialized IL-2 (R&D, Catalog No. 202-IL-500), the IL-2^{WT}-FC, and the IL-2^{3X}-FC, each of 100 μL, were added and 4-fold diluted in gradient from a maximum concentration of 266.7 nM, for a total of 12 dilution gradients, and the cells were incubated in a 37° C. incubator for 20 min;

[0390] c) 55.5 μL of 4.2% formaldehyde solution was added to immobilize the above cells at room temperature for 10 min;

[0391] d) centrifugation was performed to discard the supernatant, and 200 μL of ice methanol (Fisher, Catalog No. A452-4) was added to resuspend the cells, which were then incubated in a 4° C. refrigerator for 30 min;

[0392] e) centrifugation was performed to discard the supernatant, and the residue was washed 3 times with 200 μL of staining buffer (BD, Catalog No. 554657);

[0393] f) 200 μL of permeabilization/fixation buffer (BD, Catalog No. 51-20911KZ) containing anti-p-STAT5-AlexFlour647 (BD, Catalog No. 562076, 1:200 dilution) was added, and the cells were incubated in the dark for 3 h at room temperature;

[0394] g) the cells were washed with staining buffer for three times, resuspended with 100 μL of staining buffer, and detected using a flow cytometer;

[0395] h) the EC₅₀ values to activate p-STAT5 signals were plotted using the IL-2 molecule concentration as the abscissa and the AlexFlour647 median fluorescence value as the ordinate, and the results are shown below in Table 7.

[0396] 6. Detecting the EC₅₀ Value of each IL-2^{mutant}-FC in Activating p-STAT5 Signals in CD8⁺ CD25⁺ T Cells:

[0397] a) CD8⁺ CD25⁺ T cells were added to 96-well U-bottom plates at 1×10⁵ cells per well;

[0398] b) the EC₅₀ values to activate p-STAT5 signals were plotted through steps same as b-h in step 5, and the results are shown in Table 7.

TABLE 7
EC₅₀ of IL-2 mutants activating p-STAT5 signals in CD25^{+/-} T cells and ratios thereof

| | R&D IL2 | Y045 | Y040 | Y30E1 | Y089 | Y092 |
|---|---|---|---|---|---|---|
| CD25-pSTAT5 | 0.4697 | 3.793 | 8.399 | 3.768 | 2.196 | 0.6644 |
| EC₅₀ | | | | | | |
| CD25+pSTAT5 | 0.0009973 | 0.001919 | 3.717 | 2.186 | 0.3696 | 0.3729 |
| EC₅₀ | | | | | | |
| Ratio of CD25⁻ | 470.9716 | 1976.5503 | 2.2596 | 1.7237 | 5.9416 | 1.7817 |
| EC₅₀/CD25⁺ EC₅₀ | | | | | | |

### Example 3: Design of IL-2 Weakened Mutants

[0399] Design of IL-2 Weakened Molecules

[0400] This example was intended to further improve the pharmacokinetics (PK) of IL-2 mutants and to extend the half-lives of the molecules while reducing the toxicity of the molecules. Based on the analysis of the crystal structure of the IL-2 complex (FIG. 4) (PDB: 2ERJ), the amino acids at the interface where IL-2 contacted IL-2Rβ were selected and mutated to reduce the affinity between them.

[0401] Verification was performed based on IL-2Rα binding interface amino acid mutations, IL-2 B′C′ loop optimization and IL-2Rβγ binding interface amino acid mutations, as well as two format forms. The design of molecules is shown in Table 8. Optionally, these molecules may further comprise a T3A mutation to remove the O-glycosylation at the N-terminus of IL2.

TABLE 8
Design of IL-2 mutants

| IL-2Rβγ | IL-2Rα | | |
|---|---|---|---|
| binding | binding | B′C′ Loop | Molecular |
| interface | interface | engineering | sequence |
| L12, E15, | Y30E1(K35E, | WT (wild-type) | See the |
| H16, L19, | T37E, R38E, | Replacement with human | sequence |
| D20, D84, | F42A) | IL-15 B′C′ loop | listing |
| S87, N88, | | Truncation of human | and the |
| V91, I92, | | IL-2 B′C′ loop | description |
| E95, Q126 | K35E, T37E, | WT (wild-type) | thereof for |
| (single or | R38E | Replacement with human | specific |
| multiple | | IL-15 B′C′ loop | exemplary |
| point | | Truncation of human | molecules. |
| mutations) | | IL-2 B′C′ loop | |
| | F42A | Replacement with human | |
| | | IL-15 B′C′ loop | |
| | | Truncation of human | |
| | | IL-2 B′C′ loop | |
| | WT (wild-type) | Replacement with human | |
| | | IL-15 B′C′ loop | |
| | | Truncation of human | |
| | | IL-2 B′C′ loop | |

[0402] According to the above design, IL-2^{mutant} with the following sequence structure (from N-terminus to C-terminus) was specifically constructed for expression to produce format 1 molecules:

[0403] an IL-2 mutant sequences with amino acid sequences of SEQ ID NOs: 37-638;

[0404] a linker sequence GGGGSGGGGS; and

[0405] an Fc sequence of SEQ ID NO: 12.

[0406] According to the above design, IL-2^{mutant}-Fc.Knob and Fc.Hole with the following sequence structure (from N-terminus to C-terminus) was specifically constructed for expression to produce format 2 molecules:

[0407] (1) IL-2^{mutant}-Fc.Knob

[0408] an IL-2 mutant sequences with amino acid sequences of SEQ ID NOs: 37-638;

[0409] a linker sequence GGGGSGGGGS; and

[0410] an Fc.Knob sequence of SEQ ID NO: 9; and

[0411] (2) Fc.Hole

[0412] an Fc.Hole sequence of SEQ ID NO: 10.

[0413] Expression and Purification of IL-2 Weakened Mutants and Determination of their Affinity for Receptors

[0414] In the case of format 1, bivalent IL-2 mutant molecules were constructed by linking IL-2 mutants to the N-terminus of IgG1FcLALA via two G4S. Format 2 was a Knob-in-hole-based heterodimer of IgG1FcLALA, wherein monovalent IL-2 mutant molecules were constructed by linking IL-2 mutant molecules to the N-terminus of IgG1FcLALA-Knob via two G4S. All sequences were constructed into pcDNA3.1 vectors.

[0415] Expression and purification of proteins: the experimental procedure was the same as in Example 2.

[0416] The equilibrium dissociation constants (K_{D}) for binding of the IL-2 mutants described above in the present invention to their receptors were measured by biological optical interferometry (ForteBio).

[0417] The ForteBio affinity assay was conducted according to the method (Estep, P et al., High throughput solution Based measurement of antibody-antigen affinity and epitope binding. mAbs, 2013.5(2): p. 270-8) known in the art. The affinity of a candidate molecule for each of IL-2Rα, IL-2Rβ and IL-2Rβγ was measured: a sensor was equilibrated offline in an assay buffer for 20 min and equilibrated online for 120 s to establish a baseline; the human biotin-labeled IL-2Rα, IL-2Rβ or IL-2Rβγ was loaded onto an SA sensor (PALL, 18-5019) for ForteBio affinity assay; the sensor loaded with the IL-2 receptor was placed into a solution containing 100 nM IL-2 mutant molecules to a plateau, and then transferred to an assay buffer for dissociation for at least 2 min to measure the association and dissociation rates. The kinetic analysis was performed using a 1:1 binding model.

[0418] The experimental results are shown in Table 9. The expression yields and purity of the IL-2 mutants were improved relative to the wild-type (Y045), and meanwhile, the introduction of the IL-2Rβγ binding interface amino acid mutations led to different levels of reductions in the affinity for IL-2Rβ and IL-2Rβγ. The structures of the molecules in the table below are shown in FIG. 6.

TABLE 9
Expression of IL-2 mutants in HEK293
and their affinity of IL-2 receptors

| | Expression | Purity | K_{D} (M) | K_{D} (M) | K_{D} (M) |
|---|---|---|---|---|---|
| Molecule | yield | (SEC- | for | for | for |
| name | (mg/L) | HPLC) | IL-2Rα | IL-2Rβ | IL-2Kβγ |
| Y045 | 11.9 | 50.85% | 1.05E−09 | 2.45E−08 | — |
| Y144 | 114 | 97.78% | N.B. | 2.95E−09 | 8.67E−11 |
| 2688 | 156 | 84.38% | — | 7.90E−09 | 1.50E−10 |
| 2113 | 295 | 97.36% | — | 1.36E−08 | 2.47E−10 |
| 2131 | 281 | 97.20% | — | 1.19E−08 | 4.67E−10 |
| 2154 | 273 | 97.22% | — | 6.08E−09 | — |
| 2162 | 167.3 | 96.96% | — | 3.71E−08 | 3.13E−10 |
| 2714 | 158.2 | 85.16% | — | 3.03E−08 | 4.38E−10 |
| 2732 | 166.5 | 84.67% | — | N.B. | 3.18E−09 |
| 2755 | 168.7 | 85.02% | — | 6.32E−09 | 5.37E−10 |
| 2763 | 147.4 | 85.53% | — | 1.71E−08 | 1.60E−09 |
| 2114 | 244.4 | 97.77% | — | 1.13E−08 | 1.72E−10 |
| 2115 | 256.5 | — | — | 1.61E−08 | 4.59E−10 |
| 2116 | 239.4 | 92.05% | — | 1.76E−08 | 3.74E−10 |
| 2132 | 230.1 | 95.23% | — | N.B. | 1.99E−09 |
| 2133 | 240.5 | 97.22% | — | N.B. | 7.68E−09 |
| 2141 | 250.6 | 96.15% | — | 7.56E−09 | 1.12E−10 |
| 2092 | 346.8 | 95.57% | — | 2.31E−09 | 1.53E−10 |
| 2158 | 225 | 96.61% | — | 6.77E−09 | 3.58E−10 |
| 2107 | 307.7 | 91.97% | — | N.B. | 2.63E−09 |
| 2096 | 294.6 | 96.33% | — | 1.39E−08 | 1.12E−10 |
| 2097 | 220.5 | 96.37% | — | 1.35E−08 | 1.18E−10 |
| 2172 | 121.9 | 96.60% | — | 2.78E−09 | — |
| 2257 | 131.4 | 88.47% | — | 7.14E−10 | — |
| 2258 | 145.6 | 77.64% | — | 1.39E−09 | — |
| 2259 | 145.9 | 86.68% | — | — | — |
| 2260 | 124.2 | 83.24% | — | — | — |
| 2262 | 63.9 | 96.89% | — | 1.05E−08 | — |
| 2263 | 100.4 | 70.62% | — | 2.77E−08 | — |
| 2166 | 221.7 | 97.02% | — | 3.30E−07 | 1.72E−09 |
| 2167 | 144.3 | 96.24% | — | 2.85E−08 | 2.87E−10 |
| 2168 | 129.7 | 96.59% | — | 2.33E−08 | 6.97E−09 |
| 2169 | 105.2 | 96.64% | — | 2.47E−08 | 6.68E−09 |
| 2170 | 128.8 | 96.57% | — | 4.96E−08 | 8.61E−10 |
| 2171 | 125.7 | 95.44% | — | 1.53E−08 | 1.58E−10 |
| 2478 | 90.7 | 98.56% | — | N.B. | — |
| 2454 | 100 | 90.47% | — | N.B. | — |
| 2481 | 60 | 97.97% | — | N.B. | — |
| 3079 | 100 | 93.34% | 7.29E−09 | N.B. | 3.79E−08 |
| 3055 | 130 | 85.74% | 8.06E−09 | N.B. | 3.61E−08 |
| 3082 | 100 | 94.43% | 8.17E−09 | N.B. | 2.65E−08 |

Note:
“—” indicates no detection was performed; “N.B.” represents non-bound.

### Example 4: In Vitro Functional Assays of IL-2 Mutants

[0419] Detection of pSTAT5 Signals Caused by IL-2 Mutants in Human T Lymphocytes

[0420] The binding of IL-2 to an IL-2 receptor on the surface of a T cell will activate the JAK-STAT signaling pathway of the human T lymphocyte. The phosphorylation level of STAT5 is an important measure for the activation level of the signaling pathway. Normal T lymphocytes do not substantially express IL-2Rα. The activation activity of different IL-2 mutant molecules for human T cells was assessed by detecting the pSTAT5 signal caused by the IL-2 mutant molecule in T lymphocytes.

[0421] Experimental Materials and Methods:

[0422] Experimental Method:

[0423] 1. Thawing of PBMC Cells

[0424] (1) PBMCs (All Cells, Catalog No. PB004F-C, No. LP191011A/LP190529) cryopreserved in liquid nitrogen were thawed by rapidly shaking at 37° C.

[0425] (2) The cells were slowly added to 10 mL of CTS medium (Gibco, Catalog No. A3021002, Lot No. 1989823, preheated at 37° C. and containing 100 μL of DNase).

[0426] (3) The medium was centrifuged at 300 g for 8 min, and the supernatant was removed.

[0427] (4) The residue was resuspended in 10 mL of CTS. The suspension was transferred to a T75 culture flask (NUNC, Catalog No. 156499) and stabilized in a 5% incubator at 37° C. overnight.

[0428] 2. pSTAT5 Test

[0429] (1) The suspended PBMCs cultured overnight were plated on to a 96-well U-plate (Cornning, Catalog No. CLS3799-50EA) at 5×10⁵ cells/well.

[0430] (2) Different diluted test antibodies were added to the 96-well U-plate, and the cells were incubated with the test antibodies at 37° C. for 30 min.

[0431] (3) The mixtures were centrifuged at 400 g for 5 min, and the supernatants were removed.

[0432] (4) A 4% tissue cell fixation solution (Solarbio, Catalog No. P1110) was added at 200 μL/well, and the mixtures were centrifuged at 400 g at room temperature for 30 min.

[0433] (5) A perm buffer (BD, Catalog No. 558050) was added at 200 μL/well, and the plate was let stand at 4° C. for 30 min and centrifuged at 400 g for 10 min.

[0434] (6) A perm/wash Buffer (BD, Catalog No. 558050, Lot No. 7271605) was added at 200 μL/well. The cells were washed twice.

[0435] (7) Antibody stain solutions were prepared. The amount of pSTAT5 antibody (BD, Catalog No. 562076, Lot No. 9141872) was 3 μL/100 μL perm/wash Buffer/well. The amounts of the BV421 anti-human CD3 antibody (Biolegend, Catalog No. 300434, Lot No. B271302), FTIC anti-human CD4 antibody (Biolegend, Catalog No. 300506, Lot No. B283935) and AF700 anti-human CD8a (Biolegend, Catalog No. 300924, Lot No. B253967) were 1 μL/100 μL perm/wash Buffer/well. Incubation was performed at room temperature for 1.5 h, followed by 2 washings with perm/wash Buffer.

[0436] (8) Resuspension was performed in 150 μL perm/wash Buffer/well, followed by a flow cytometry assay.

[0437] Experimental Results:

[0438] The pSTAT5 effect assay results of IL-2 mutant molecules in normal T lymphocytes (CD4⁺ T cells and CD8⁺ T cells) are shown in FIGS. 7A, 7B, 7C, 7D and 7E.

[0439] The phosphorylation levels of CD4⁺ and CD8⁺ T cells represent the proliferation capacity of the cells and the activity of the cells. It can be seen from FIG. 7 and Table 10 that the phosphorylation levels of T cells caused by the IL-2 mutants were reduced to different degrees by mutating one or more amino acids at the IL-2Rβ binding interface, relative to the molecules Y-144 (format 1) and 2688 (format 2) without mutations at the IL-2Rβ binding interface.

TABLE 10
Ratios of reductions in the activation activity of IL-2
mutants for CD4⁺ and CD8⁺ T cells

| | 10-50 | 50-100 | 100-1000 | >1000 |
|---|---|---|---|---|
| Ratio of reduction | times | times | times | times |
| IL-2 mutant EC₅₀ | 2154, 2096, | 2115, | 2113, 2116, | 2131, 2162, |
| (CD4⁺ or CD8⁺)/ | 2257 | 2171 | 2158, 2258, | 2107, 2166, |
| Y-144 EC₅₀ | | | 2167 | 2168, 2169, |
| | | | | 2170 |
| IL-2 mutant EC₅₀ | 2714 | | 2763 | 2732 |
| (CD4⁺ or CD8⁺)/ | | | | |
| 2688 EC₅₀ | | | | |

[0440] Detection of pSTAT5 Signals Caused by IL-2 Mutants in Activated T Lymphocytes

[0441] The binding of IL-2 to an IL-2 receptor on the surface of a T cell will activate the JAK-STAT signaling pathway of the T lymphocyte. The phosphorylation level of STAT5 is an important measure for the activation level of the signaling pathway. After the T lymphocyte is activated, the abundance of IL-2Rα (CD25) on the surface of the T cell is significantly increased.

[0442] Experimental Method:

[0443] 1. Thawing of PBMC Cells

[0444] (1) PBMCs (All Cells, Catalog No. PB004F-C, No. LP191011A) cryopreserved in liquid nitrogen were thawed by rapidly shaking at 37° C.

[0445] (2) The cells were slowly added to 10 mL of CTS medium (Gibco, Catalog No. A3021002, Lot No. 1989823, preheated at 37° C. and containing 100 μL of DNase).

[0446] (3) The medium was centrifuged at 300 g for 8 min, and the supernatant was removed.

[0447] (4) The residue was resuspended in 10 mL of CTS. The suspension was transferred to a T75 culture flask (NUNC, Catalog No. 156499) and stabilized in a 5% incubator (Thermo, Catalog No. 3111) at 37° C. overnight.

[0448] 2. Activation and Resting of T Lymphocytes

[0449] (1) The suspended PBMCs cultured overnight were counted, and activated and stimulated for 48 h by adding an equal number of CD3/CD28 Beads (Invitrogen, Catalog No. 11131D, Lot No. 00783216).

[0450] (2) The beads and medium were removed and the activated cells were washed.

[0451] (3) The activated cells were transferred to a T75 culture flask and rested at 37° C./5% for 48 h.

[0452] 3. pSTAT5 Test

[0453] (1) The cells were plated on to a 96-well U-plate (Cornning, Catalog No. CLS3799-50EA) at 5×10⁵ cells/well.

[0454] (2) Different diluted test antibodies were added to the 96-well U-plate, and the cells were incubated with the test antibodies at 37° C. for 30 min.

[0455] (3) The mixtures were centrifuged at 400 g for 5 min, and the supernatants were removed.

[0456] (4) A 4% tissue cell fixation solution (Solarbio, Catalog No. P1110) was added at 200 μL/well, and the mixtures were centrifuged at 400 g at room temperature for 30 min.

[0457] (5) A perm buffer (BD, Catalog No. 558050) was added at 200 μL/well, and the plate was let stand at 4° C. for 30 min and centrifuged at 400 g for 10 min.

[0458] (6) A perm/wash Buffer (BD, Catalog No. 558050, Lot No. 7271605) was added at 200 μL/well. The cells were washed twice.

[0459] (7) Antibody stain solutions were prepared. The amount of pSTAT5 antibody (BD, Catalog No. 562076, Lot No. 9141872) was 3 μL/100 μL perm/wash Buffer/well. The amounts of the BV421 anti-human CD3 antibody (Biolegend, Catalog. No. 300434, Lot No. B271302), FTIC anti-human CD4 antibody (Biolegend, Catalog No. 300506, Lot No. B283935) and AF700 anti-human CD8a (Biolegend, Catalog No. 300924, Lot No. B253967) were 1 μL/100 μL perm/wash Buffer/well. Incubation was performed at room temperature for 1.5 h, followed by 2 washings with perm/wash Buffer.

[0460] (8) Resuspension was performed in 150 μL perm/wash Buffer/well, followed by a flow cytometry assay.

[0461] Experimental Results

[0462] The pSTAT5 effect assay results of the IL-2 mutant molecules in CD8⁺ T cells, CD4⁺ CD25⁻ T cells, NK cells (CD3⁻ CD56⁺) and Treg cells (CD3⁺ CD4⁺ CD25⁺) are shown in FIGS. 8A-G and Tables 11-12. It can be seen from the results that the IL-2 mutant molecules of this study had weaker pSTAT5 activity on lymphocytes than human wild-type IL-2 (rhIL-2, R&D systems, Catalog No. 202-IL) while showing great selectivity for Treg cells relative to other lymphocytes.

TABLE 11
EC₅₀ of pSTAT5 of rhIL-2 and IL-2
mutants of different lymphocytes

| EC50 (nM) | CD8⁺T | CD4⁺CD25⁻T | NK | Treg |
|---|---|---|---|---|
| rhIL-2 | 1.685 | 0.1024 | 0.02422 | 0.0003881 |
| 2478 | 21740 | 1475 | 22.08 | 0.06178 |
| 2454 | ~34240531 | 636.5 | 147.6 | 0.1146 |
| 2481 | ~34240531 | 636.5 | 147.6 | 0.1146 |
| 3079 | 275.4 | 63.16 | 2.298 | 0.08149 |
| 3055 | ~28361571 | 578.4 | 83.79 | 1.165 |
| 3082 | ~33933462 | 319.6 | 82.27 | 9.002 |

TABLE 12
Ratios of selectivity of IL-2 mutants for Treg cells to that for other lymphocytes

| Ratio (other | | | | |
|---|---|---|---|---|
| lymphocytes | | | | |
| EC₅₀/Treg cells) | CD8⁺T | CD4⁺CD25⁻T | NK | Treg |
| 2478 | 351893.8168 | 23875.04047 | 357.3972159 | 1 |
| 2454 | 298782993 | 5554.101222 | 1287.958115 | 1 |
| 2481 | 28232534.83 | 1632.687734 | 1290.859667 | 1 |
| 3079 | 3379.555774 | 775.0644251 | 28.19977911 | 1 |
| 3055 | 24344696.14 | 496.4806867 | 71.92274678 | 1 |
| 3082 | 3769546.99 | 35.50322151 | 9.139080204 | 1 |

### Example 5: In Vivo Anti-Tumor Efficacy of IL-2 Mutant Molecule

[0463] To demonstrate the in vivo anti-tumor efficacy of the IL-2 mutant molecules, C57 mice were inoculated with MC38 cells to determine the anti-tumor efficacy of the IL-2 mutant molecules (Y144, 2113 and 2162) of the present invention (the structures of the molecules 2113 and 2162 are shown in FIG. 6). SPF female C57 mice (14-17 g, purchased from Beijing Vital River Laboratory Animal Technology Co., Ltd.) with certificate No. 110011201109499961 were used in the experiment.

[0464] The MC38 cells were subcultured conventionally for subsequent in vivo study. The MC38 cells were collected by centrifugation and dispersed in PBS (1×) to form a cell suspension with a cell concentration of 5×10⁶ cells/mL.

[0465] On day 0, 0.2 mL of the cell suspension was subcutaneously inoculated into the right abdominal region of the C57 mice to establish MC38 tumor-bearing mouse models.

[0466] 7 days after the tumor cell inoculation, the tumor volume in each mouse was measured. The mice were divided into groups of 6. The dosages and routes of administration are shown in Tables 13 and 14. Administration was performed on days 7, 14 and 21 after the inoculation. The tumor volume and body weight of the mice were monitored twice a week for 25 days, as shown in FIGS. 9A and 9B. On day 25 after inoculation, the relative tumor growth inhibition (TGI %) was calculated by the following formula: TGI %=100%×(control group tumor volume−treatment group tumor volume)/(control group tumor volume−control group tumor volume before administration). Tumor volume measurement: The maximum length of major axis (L) and maximum length of minor axis (W) of tumors were measured with a vernier caliper, and tumor volume was calculated using the following formula: V=L×W²/2. The mice were weighted using an electronic balance.

TABLE 13
Experimental design (note: administration was
performed every 7 days, 3 times in total)

| | Dosage of | Number of | Route of |
|---|---|---|---|
| Groups | administration | administration | administration |
| h-IgG* | 3 mg/kg | Q7Dx3 | Intraperitoneal |
| Y144 | 1 mg/kg | Q7Dx3 | Intraperitoneal |
| Y144 | 3 mg/kg | Q7Dx3 | Intraperitoneal |
| 2113 | 1 mg/kg | Q7Dx3 | Intraperitoneal |
| 2113 | 3 mg/kg | Q7Dx3 | Intraperitoneal |
| 2162 | 1 mg/kg | Q7Dx3 | Intraperitoneal |
| 2162 | 3 mg/kg | Q7Dx3 | Intraperitoneal |

*h-IgG: purchased from Equitech-Bio, Lot No. 161206-0656, 1 g/vial, prepared at 10 mg/mL with PBS.

[0467] The tumor volume measurements are shown in FIG. 9A. On day 25 after inoculation, compared to h-IgG, the weakened IL-2 molecules 2113 (3 mg/kg) and 2162 (3 mg/kg) had single-drug inhibition rates of 71.4% and 33.8%, respectively. The results show that the engineered IL2 molecules (2113 and 2162) had an anti-tumor effect and achieved a dose-dependent response. Meanwhile, the body weight of the mice was measured. As shown in FIGS. 9B and 9C, there was no significant difference in body weight of mice in the molecule 2113 (1 mg/kg), 2162 (1 mg/kg) and 2162 (3 mg/kg) groups. In contrast, in the group where the molecule Y144 not weakened was administered, the mice were intolerant and died before the end of the 25-day monitoring period.

[0468] The anti-tumor in vivo efficacy of several additional IL-2 mutant molecules (Y045, 2478 and 2454) was demonstrated in another MC38 tumor model (see FIG. 6 for the structures of molecules 2478 and 2454). SPF female C57 mice (14-17 g, purchased from Beijing Vital River Laboratory Animal Technology Co., Ltd.) with certificate No. 110011201109499826 were used to prepare MC38 tumor-bearing mice in the experiment. The experiment was conducted substantially as described above.

[0469] 7 days after the tumor cell inoculation, the tumor volume in each mouse was measured. The mice were divided into groups of 7. The dosages and routes of administration are shown in Table 14. Administration was performed on days 7, 14 and 21 after the inoculation. The tumor volume and body weight of the mice were monitored 2-3 times a week for 25 days, as shown in FIGS. 10A and 10B. On day 25 after inoculation, the relative tumor growth inhibition (TGI) was calculated by the following formula: TGI 32 100%×(control group tumor volume−treatment group tumor volume)/(control group tumor volume—control group tumor volume before administration). Tumor volume measurement: The maximum length of major axis (L) and maximum length of minor axis (W) of tumors were measured with a vernier caliper, and tumor volume was calculated using the following formula: V=L×W²/2. The mice were weighted using an electronic balance.

TABLE 14
Experimental design (note: administration was
performed every 7 days, 3 times in total)

| | Dosage of | Number of | Route of |
|---|---|---|---|
| Groups | administration | administration | administration |
| h-IgG | 3 mg/kg | Q7Dx3 | Intraperitoneal |
| Y045 | 1 mg/kg | Q7Dx3 | Intraperitoneal |
| Y045 | 3 mg/kg | Q7Dx3 | Intraperitoneal |
| 2478 | 1 mg/kg | Q7Dx3 | Intraperitoneal |
| 2478 | 3 mg/kg | Q7Dx3 | Intraperitoneal |
| 2454 | 1 mg/kg | Q7Dx3 | Intraperitoneal |
| 2454 | 3 mg/kg | Q7Dx3 | Intraperitoneal |

* h-IgG: purchased from Equitech-Bio, Lot No. 161206-0656, 1 g/vial, prepared at 10 mg/mL with PBS.

[0470] The tumor growth inhibition results are shown in Table 15: on day 25 after inoculation, compared to h-IgG, the molecules Y045 (1 mg/kg), 2478 (1 mg/kg), 2454 (1 mg/kg), Y045 (3 mg/kg), 2478 (3 mg/kg) and 2454 (3 mg/kg) had single-drug inhibition rates of 5.3%, 39.1%, 15.6%, 19.8%, 52.6% and 23.0%, respectively. The results show that the IL2 molecule not engineered (Y045) had an anti-tumor effect and achieved a dose-dependent response; the weakened IL2 molecules obtained by engineering (2478, 2454) had anti-tumor effects and achieved dose-dependent responses, and the efficacy was better than that of the IL2 molecule not engineered (Y045). Meanwhile, the body weight of the mice was measured. As shown in FIGS. 10B and 10C, there was no significant difference in body weight of mice.

TABLE 15
Tumor growth inhibition on day 25

| | | Tumor growth |
|---|---|---|
| Groups | Tumor volume (mm³) | inhibition (%) |
| h-IgG, 3 mg/kg | 2473 | N/A |
| Y045, 1 mg/kg | 2377 | 5.3 |
| 2478, 1 mg/kg | 1772 | 39.1 |
| 2454, 1 mg/kg | 2323 | 15.6 |
| Y045, 3 mg/kg | 2131 | 19.8 |
| 2478, 3 mg/kg | 1478 | 52.6 |
| 2454, 3 mg/kg | 2354 | 23.0 |

### Example 6: In Vivo Study of IL-2 Mutant Molecules in Autoimmunity

[0471] To demonstrate the potential of IL-2 weakened molecules in autoimmunity, the effects of the IL-2 weakened molecules of the present invention on immune cells were determined using the blood collected from C57 mice before administration and on days 3 and 7 after administration. SPF female C57 mice (14-17 g, purchased from Beijing Vital River Laboratory Animal Technology Co., Ltd.) with certificate No. 110011201109500076 were used in the experiment.

[0472] 30 C57 mice were randomized into groups of 6. The dosages and routes of administration are shown in Table 16. A single dose was administered. The body weight of the mice was monitored twice a week for 7 days, as shown in FIGS. 11A and 11B. Blood was collected from the mice before administration and on days 3 and 7 after administration and tested for changes in the percentages of Treg, NK, CD4 T conv (CD4⁺ Foxp3⁻) and CD8⁺ T cells in the total number of CD45⁺ T lymphocytes, as shown in FIGS. 11C, 11D, 11E and 11F.

[0473] The tested molecule 2602 is an IL-2-Fc dimeric molecule of format 2 comprising the wild-type IL-2^{WT} sequence SEQ ID NO: 1; the structures of the weakened molecules 3079, 3055 and 3082 are shown in FIG. 6, and they are all IL-2-Fc dimeric molecules of format 2 as well.

[0474] It can be concluded from the results that the IL-2 mutant molecules of this study has weakened binding to IL-2Rβ, so that the IL-2 mutant molecules had weaker stimulatory effects on the proliferation of pro-inflammatory NK cells than the wild-type IL-2 molecule 2602 (IL-2^{WT}), but maintained the expansion of the immunosuppression cells Treg cells; the IL-2 mutant molecules showed similar Treg proliferation levels. In addition, the IL-2 mutant molecules had no significant proliferation effect on CD4 T conv and CD8 T cells, which suggests that its selectivity for Treg and other immune cells can be greatly improved by mutating the binding sites of IL-2 to IL-2Rβ.

TABLE 16
Experimental design (note: SD: Single dose)

| | Dosage of | Number of | Route of |
|---|---|---|---|
| Groups | administration | administration | administration |
| h-IgG | 0.5 mg/kg | SD | Intraperitoneal |
| 2602 | 0.5 mg/kg | SD | Intraperitoneal |
| 3079 | 0.5 mg/kg | SD | Intraperitoneal |
| 3055 | 0.5 mg/kg | SD | Intraperitoneal |
| 3082 | 0.5 mg/kg | SD | Intraperitoneal |

* h-IgG: purchased from Equitech-Bio, Lot No. 161206-0656, 1 g/vial, prepared at 10 mg/mL with PBS.

[0475] Sequence Listing Description

| SEQ ID | | |
|---|---|---|
| NO | Name | Description |
| 1 | Wild-type IL-2 | IL-2^{wt} with mutation C125S |
| 2 | Full-length human IL-2 | A native hIL-2 |
| 3 | Mature human IL-2 | A native hIL-2 with signal peptides removed |
| 4 | IL-2 mutant | IL-2^{3X} with mutations C125S, R38D, K43E and E61R |
| 5 | IL-2Rα receptor | An IL-2Rα receptor with an avi tag and an His6 tag at the |
| | | C-terminus |
| 6 | IL-2Rβ receptor | An IL-2Rβ receptor with an avi tag and an His6 tag at the |
| | | C-terminus |
| 7 | IL-2Rβ-Fc.Knob | An IL-2Rβ with Fc-Knob connected at the C-terminus |
| 8 | IL-2Rγ-Fc.Hole | An IL-2Rγ with Fc-Hole connected at the C-terminus |
| 9 | Fc.Knob | A human IgG1 Fc region with mutation LALA and Knob |
| | | mutations T366W and S354C, for format 2 |
| 10 | Fc.Hole | A human IgG1 Fc region with mutation LALA and hole |
| | | mutations Y349C, T366S, L368A and Y407V, as well as a |
| | | hinge region, for format 2 |
| 11 | Fc.Hole | A human IgG1 Fc region with mutation LALA and hole |
| | | mutations Y349C, T366S, L368A and Y407V, as well as |
| | | mutation H435R, for IL-2βγ complex |
| 12 | Mutant Fc region | A human IgG1 Fc with mutation LALA, for format 1 |
| 13 | Y001 | IL-2^{wt}-GSGS-FcLALA |
| 14 | Y002 | IL-^{2.3X}-GSGS-FcLALA |
| 15 | Y017 | IL-2^{hyb15BCL}-GSGS-FcLALA |
| 16 | Y057 | IL-2^{truncate1}-GSGS-FcLALA |
| 17 | Y058 | IL-2^{truncate2}-GSGS-FcLALA |
| 18 | Y059 | IL-2^{truncate3}-GSGS-FcLALA |
| 19 | Y060 | IL-2^{truncate4}-GSGS-FcLALA |
| 20 | Y089 | IL-2^{.Y30E1truncate1}-2*(G4S)-FcLALA |
| 21 | Y092 | IL-2^{.Y30E1.15BCL}-2*(G4S)-FcLALA |
| 22 | Y144 | IL-2^{.Y30E1.15BCL.T3A}-2*(G4S)-FcLALA |
| 23 | Y040 | IL-^{2.3X}-2*(G4S)-FcLALA |
| 24 | Y045 | IL-2^{WT}-2*(G4S)-FcLALA |
| 25 | IL-2^{.15BCL} | An IL-2 mutant with a chimeric loop sequence AGDASIH |
| 26 | IL-2^{.truncate1} | An IL-2 mutant with a truncated loop sequence AQSKNFH |
| 27 | IL-2^{.Y30E1} | An IL-2 mutant with K35E, T37E, R38E and F42A |
| 28 | IL-2^{.Y30E1.T3A} | An IL-2 mutant with K35E, T37E, R38E, F42A and T3A |
| 29 | IL-2^{.Y30E1.15BCL.T3A} | An IL-2 mutant with K35E, T37E, R38E, F42A and T3A, as |
| | | well as a chimeric loop sequence AGDASIH |
| 30 | IL-2^{.Y30E1.truncate1.T3A} | An IL-2 mutant sequence with K35E, T37E, R38E, F42A |
| | | and T3A, as well as a truncated loop sequence AQSKNFH |
| 31 | IL-2^{K35E.T37E.R38E.T3A} | An IL-2 mutant sequence with K35E, T37E, R38E and T3A |
| 32 | IL-2^{K35E.T37E.R38E.T3A.15BCL} | An IL-2 mutant sequence with K35E, T37E, R38E and T3A, |
| | | as well as a chimeric loop sequence AGDASIH |
| 33 | IL-2^{K35E.T37E.R38E.T3A.truncate1} | An IL-2 mutant sequence with K35E, T37E, R38E and T3A, |
| | | as well as a truncated loop sequence AQSKNFH |
| 34 | IL-2^{.15BCL.T3A} | An IL-2 mutant sequence with T3A and a chimeric loop |
| | | sequence AGDASIH |
| 35 | IL-2^{.truncate1.T3A} | An IL-2 mutant sequence with T3A and a truncated loop |
| | | sequence AQSKNFH |
| 36-638 | — | An IL-2 sequence for forming a dimeric molecule |

[0476] The IL-2 dimeric molecules constructed in the present invention are described in detail in the table below. The “IL-2 sequence SEQ ID NO” column shows the amino acid sequences of the IL-2 portions of the molecules. The “annotations for IL-2 portions” column describes, through the amino acid sequences in the “SEQ ID NO:” column and the mutations in the “mutations” column, that the IL-2 amino acid sequences of the molecules consist of the SEQ ID NO: amino acid sequences with the mutations. “Format 1” indicates that the molecules are homodimers, and each monomer (from N-terminus to C-terminus) is formed by linking the IL-2 amino acid sequence, the linker sequence (G4S)2 and SEQ ID NO: 12 in order. “Format 2” indicates that the molecules are heterodimers, in which one monomer (from N-terminus to C-terminus) is formed by linking the IL-2 amino acid sequence, the linker sequence (G4S)2 and SEQ ID NO: 9 in order, and the other monomer consists of SEQ ID NO: 10.

| | | | | IL-2 | | | | | IL-2 |
|---|---|---|---|---|---|---|---|---|---|
| Molecule_ID | | | | SEQ ID | Molecule_ID | | Annotations for | | SEQ ID |
| Format | Format | Annotations for IL-2 portions | | NO | Format | Format | IL-2 portions | | NO |
| 1 | 2 | SEQ ID NO: | Mutations | sequence | 1 | 2 | SEQ ID NO: | Mutations | sequence |
| Y045 | 2602 | SEQ ID NO: 1 | — | 36 | | | | | |
| Y30E1 | 2603 | SEQ ID NO: 27 | — | 37 | Y144 | 2688 | SEQ ID NO: 29 | — | 122 |
| 2003 | 2604 | SEQ ID NO: 28 | L12R | 38 | 2088 | 2689 | SEQ ID NO: 29 | L12R | 123 |
| 2004 | 2605 | SEQ ID NO: 28 | L12K | 39 | 2089 | 2690 | SEQ ID NO: 29 | L12K | 124 |
| 2005 | 2606 | SEQ ID NO: 28 | L12E | 40 | 2090 | 2691 | SEQ ID NO: 29 | L12E | 125 |
| 2006 | 2607 | SEQ ID NO: 28 | L12Q | 41 | 2091 | 2692 | SEQ ID NO: 29 | L12Q | 126 |
| 2007 | 2608 | SEQ ID NO: 28 | E15Q | 42 | 2092 | 2693 | SEQ ID NO: 29 | E15Q | 127 |
| 2008 | 2609 | SEQ ID NO: 28 | E15R | 43 | 2093 | 2694 | SEQ ID NO: 29 | E15R | 128 |
| 2009 | 2610 | SEQ ID NO: 28 | E15A | 44 | 2094 | 2695 | SEQ ID NO: 29 | E15A | 129 |
| 2010 | 2611 | SEQ ID NO: 28 | E15S | 45 | 2095 | 2696 | SEQ ID NO: 29 | E15S | 130 |
| 2011 | 2612 | SEQ ID NO: 28 | H16N | 46 | 2096 | 2697 | SEQ ID NO: 29 | H16N | 131 |
| 2012 | 2613 | SEQ ID NO: 28 | H16T | 47 | 2097 | 2698 | SEQ ID NO: 29 | H16T | 132 |
| 2013 | 2614 | SEQ ID NO: 28 | H16Y | 48 | 2098 | 2699 | SEQ ID NO: 29 | H16Y | 133 |
| 2014 | 2615 | SEQ ID NO: 28 | H16A | 49 | 2099 | 2700 | SEQ ID NO: 29 | H16A | 134 |
| 2015 | 2616 | SEQ ID NO: 28 | H16E | 50 | 2100 | 2701 | SEQ ID NO: 29 | H16E | 135 |
| 2016 | 2617 | SEQ ID NO: 28 | H16D | 51 | 2101 | 2702 | SEQ ID NO: 29 | H16D | 136 |
| 2017 | 2618 | SEQ ID NO: 28 | H16R | 52 | 2102 | 2703 | SEQ ID NO: 29 | H16R | 137 |
| 2018 | 2619 | SEQ ID NO: 28 | L19D | 53 | 2103 | 2704 | SEQ ID NO: 29 | L19D | 138 |
| 2019 | 2620 | SEQ ID NO: 28 | L19E | 54 | 2104 | 2705 | SEQ ID NO: 29 | L19E | 139 |
| 2020 | 2621 | SEQ ID NO: 28 | L19R | 55 | 2105 | 2706 | SEQ ID NO: 29 | L19R | 140 |
| 2021 | 2622 | SEQ ID NO: 28 | L19S | 56 | 2106 | 2707 | SEQ ID NO: 29 | L19S | 141 |
| 2022 | 2623 | SEQ ID NO: 28 | D20N | 57 | 2107 | 2708 | SEQ ID NO: 29 | D20N | 142 |
| 2023 | 2624 | SEQ ID NO: 28 | D20Q | 58 | 2108 | 2709 | SEQ ID NO: 29 | D20Q | 143 |
| 2024 | 2625 | SEQ ID NO: 28 | D20E | 59 | 2109 | 2710 | SEQ ID NO: 29 | D20E | 144 |
| 2025 | 2626 | SEQ ID NO: 28 | D20A | 60 | 2110 | 2711 | SEQ ID NO: 29 | D20A | 145 |
| 2026 | 2627 | SEQ ID NO: 28 | D20R | 61 | 2111 | 2712 | SEQ ID NO: 29 | D20R | 146 |
| 2027 | 2628 | SEQ ID NO: 28 | D20S | 62 | 2112 | 2713 | SEQ ID NO: 29 | D20S | 147 |
| 2028 | 2629 | SEQ ID NO: 28 | D84N | 63 | 2113 | 2714 | SEQ ID NO: 29 | D84N | 148 |
| 2029 | 2630 | SEQ ID NO: 28 | D84E | 64 | 2114 | 2715 | SEQ ID NO: 29 | D84E | 149 |
| 2030 | 2631 | SEQ ID NO: 28 | D84Q | 65 | 2115 | 2716 | SEQ ID NO: 29 | D84Q | 150 |
| 2031 | 2632 | SEQ ID NO: 28 | D84T | 66 | 2116 | 2717 | SEQ ID NO: 29 | D84T | 151 |
| 2032 | 2633 | SEQ ID NO: 28 | D84S | 67 | 2117 | 2718 | SEQ ID NO: 29 | D84S | 152 |
| 2033 | 2634 | SEQ ID NO: 28 | D84R | 68 | 2118 | 2719 | SEQ ID NO: 29 | D84R | 153 |
| 2034 | 2635 | SEQ ID NO: 28 | D84G | 69 | 2119 | 2720 | SEQ ID NO: 29 | D84G | 154 |
| 2035 | 2636 | SEQ ID NO: 28 | D84M | 70 | 2120 | 2721 | SEQ ID NO: 29 | D84M | 155 |
| 2036 | 2637 | SEQ ID NO: 28 | D84F | 71 | 2121 | 2722 | SEQ ID NO: 29 | D84F | 156 |
| 2037 | 2638 | SEQ ID NO: 28 | D84L | 72 | 2122 | 2723 | SEQ ID NO: 29 | D84L | 157 |
| 2038 | 2639 | SEQ ID NO: 28 | D84K | 73 | 2123 | 2724 | SEQ ID NO: 29 | D84K | 158 |
| 2039 | 2640 | SEQ ID NO: 28 | D84H | 74 | 2124 | 2725 | SEQ ID NO: 29 | D84H | 159 |
| 2040 | 2641 | SEQ ID NO: 28 | S87T | 75 | 2125 | 2726 | SEQ ID NO: 29 | S87T | 160 |
| 2041 | 2642 | SEQ ID NO: 28 | S87R | 76 | 2126 | 2727 | SEQ ID NO: 29 | S87R | 161 |
| 2042 | 2643 | SEQ ID NO: 28 | S87K | 77 | 2127 | 2728 | SEQ ID NO: 29 | S87K | 162 |
| 2043 | 2644 | SEQ ID NO: 28 | S87L | 78 | 2128 | 2729 | SEQ ID NO: 29 | S87L | 163 |
| 2044 | 2645 | SEQ ID NO: 28 | S87M | 79 | 2129 | 2730 | SEQ ID NO: 29 | S87M | 164 |
| 2045 | 2646 | SEQ ID NO: 28 | S87H | 80 | 2130 | 2731 | SEQ ID NO: 29 | S87H | 165 |
| 2046 | 2647 | SEQ ID NO: 28 | N88D | 81 | 2131 | 2732 | SEQ ID NO: 29 | N88D | 166 |
| 2047 | 2648 | SEQ ID NO: 28 | N88T | 82 | 2132 | 2733 | SEQ ID NO: 29 | N88T | 167 |
| 2048 | 2649 | SEQ ID NO: 28 | N88Q | 83 | 2133 | 2734 | SEQ ID NO: 29 | N88Q | 168 |
| 2049 | 2650 | SEQ ID NO: 28 | N88R | 84 | 2134 | 2735 | SEQ ID NO: 29 | N88R | 169 |
| 2050 | 2651 | SEQ ID NO: 28 | N88E | 85 | 2135 | 2736 | SEQ ID NO: 29 | N88E | 170 |
| 2051 | 2652 | SEQ ID NO: 28 | N88K | 86 | 2136 | 2737 | SEQ ID NO: 29 | N88K | 171 |
| 2052 | 2653 | SEQ ID NO: 28 | N88H | 87 | 2137 | 2738 | SEQ ID NO: 29 | N88H | 172 |
| 2053 | 2654 | SEQ ID NO: 28 | N88M | 88 | 2138 | 2739 | SEQ ID NO: 29 | N88M | 173 |
| 2054 | 2655 | SEQ ID NO: 28 | N88S | 89 | 2139 | 2740 | SEQ ID NO: 29 | N88S | 174 |
| 2055 | 2656 | SEQ ID NO: 28 | N88L | 90 | 2140 | 2741 | SEQ ID NO: 29 | N88L | 175 |
| 2056 | 2657 | SEQ ID NO: 28 | V91I | 91 | 2141 | 2742 | SEQ ID NO: 29 | V91I | 176 |
| 2057 | 2658 | SEQ ID NO: 28 | V91L | 92 | 2142 | 2743 | SEQ ID NO: 29 | V91L | 177 |
| 2058 | 2659 | SEQ ID NO: 28 | V91D | 93 | 2143 | 2744 | SEQ ID NO: 29 | V91D | 178 |
| 2059 | 2660 | SEQ ID NO: 28 | V91E | 94 | 2144 | 2745 | SEQ ID NO: 29 | V91E | 179 |
| 2060 | 2661 | SEQ ID NO: 28 | V91N | 95 | 2145 | 2746 | SEQ ID NO: 29 | V91N | 180 |
| 2061 | 2662 | SEQ ID NO: 28 | V91Q | 96 | 2146 | 2747 | SEQ ID NO: 29 | V91Q | 181 |
| 2062 | 2663 | SEQ ID NO: 28 | V91S | 97 | 2147 | 2748 | SEQ ID NO: 29 | V91S | 182 |
| 2063 | 2664 | SEQ ID NO: 28 | V91H | 98 | 2148 | 2749 | SEQ ID NO: 29 | V91H | 183 |
| 2064 | 2665 | SEQ ID NO: 28 | I92E | 99 | 2149 | 2750 | SEQ ID NO: 29 | I92E | 184 |
| 2065 | 2666 | SEQ ID NO: 28 | I92T | 100 | 2150 | 2751 | SEQ ID NO: 29 | I92T | 185 |
| 2066 | 2667 | SEQ ID NO: 28 | I92K | 101 | 2151 | 2752 | SEQ ID NO: 29 | I92K | 186 |
| 2067 | 2668 | SEQ ID NO: 28 | I92R | 102 | 2152 | 2753 | SEQ ID NO: 29 | I92R | 187 |
| 2068 | 2669 | SEQ ID NO: 28 | I92L | 103 | 2153 | 2754 | SEQ ID NO: 29 | I92L | 188 |
| 2069 | 2670 | SEQ ID NO: 28 | E95Q | 104 | 2154 | 2755 | SEQ ID NO: 29 | E95Q | 189 |
| 2070 | 2671 | SEQ ID NO: 28 | E95G | 105 | 2155 | 2756 | SEQ ID NO: 29 | E95G | 190 |
| 2071 | 2672 | SEQ ID NO: 28 | E95D | 106 | 2156 | 2757 | SEQ ID NO: 29 | E95D | 191 |
| 2072 | 2673 | SEQ ID NO: 28 | E95N | 107 | 2157 | 2758 | SEQ ID NO: 29 | E95N | 192 |
| 2073 | 2674 | SEQ ID NO: 28 | Q126E | 108 | 2158 | 2759 | SEQ ID NO: 29 | Q126E | 193 |
| 2074 | 2675 | SEQ ID NO: 28 | Q126D | 109 | 2159 | 2760 | SEQ ID NO: 29 | Q126D | 194 |
| 2075 | 2676 | SEQ ID NO: 28 | Q126A | 110 | 2160 | 2761 | SEQ ID NO: 29 | Q126A | 195 |
| 2076 | 2677 | SEQ ID NO: 28 | Q126S | 111 | 2161 | 2762 | SEQ ID NO: 29 | Q126S | 196 |
| 2077 | 2678 | SEQ ID NO: 28 | D84N + E95Q | 112 | 2162 | 2763 | SEQ ID NO: 29 | D84N + E95Q | 197 |
| 2078 | 2679 | SEQ ID NO: 28 | D84E + E95Q | 113 | 2163 | 2764 | SEQ ID NO: 29 | D84E + E95Q | 198 |
| 2079 | 2680 | SEQ ID NO: 28 | D84T + E95Q | 114 | 2164 | 2765 | SEQ ID NO: 29 | D84T + E95Q | 199 |
| 2080 | 2681 | SEQ ID NO: 28 | D84Q + E95Q | 115 | 2165 | 2766 | SEQ ID NO: 29 | D84Q + E95Q | 200 |
| 2081 | 2682 | SEQ ID NO: 28 | D84T + H16T | 116 | 2166 | 2767 | SEQ ID NO: 29 | D84T + H16T | 201 |
| 2082 | 2683 | SEQ ID NO: 28 | D84N + V91I | 117 | 2167 | 2768 | SEQ ID NO: 29 | D84N + V91I | 202 |
| 2083 | 2684 | SEQ ID NO: 28 | D84T + Q126E | 118 | 2168 | 2769 | SEQ ID NO: 29 | D84T + Q126E | 203 |
| 2084 | 2685 | SEQ ID NO: 28 | D84N + Q126E | 119 | 2169 | 2770 | SEQ ID NO: 29 | D84N + Q126E | 204 |
| 2085 | 2686 | SEQ ID NO: 28 | H16T + D84Q | 120 | 2170 | 2771 | SEQ ID NO: 29 | H16T + D84Q | 205 |
| 2086 | 2687 | SEQ ID NO: 28 | H16T + V91I | 121 | 2171 | 2772 | SEQ ID NO: 29 | H16T + V91I | 206 |
| 2172 | 2773 | SEQ ID NO: 30 | | 207 | 2264 | 2865 | SEQ ID NO: 32 | | 299 |
| 2173 | 2774 | SEQ ID NO: 30 | L12R | 208 | 2265 | 2866 | SEQ ID NO: 32 | L12R | 300 |
| 2174 | 2775 | SEQ ID NO: 30 | L12K | 209 | 2266 | 2867 | SEQ ID NO: 32 | L12K | 301 |
| 2175 | 2776 | SEQ ID NO: 30 | L12E | 211 | 2267 | 2868 | SEQ ID NO: 32 | L12E | 302 |
| 2176 | 2777 | SEQ ID NO: 30 | L12Q | 21 | 2268 | 2869 | SEQ ID NO: 32 | L12Q | 303 |
| 2177 | 2778 | SEQ ID NO: 30 | E15Q | 211 | 2269 | 2870 | SEQ ID NO: 32 | E15Q | 304 |
| 2178 | 2779 | SEQ ID NO: 30 | E15R | 212 | 2270 | 2871 | SEQ ID NO: 32 | E15R | 305 |
| 2179 | 2780 | SEQ ID NO: 30 | E15A | 214 | 2271 | 2872 | SEQ ID NO: 32 | E15A | 306 |
| 2180 | 2781 | SEQ ID NO: 30 | E15S | 215 | 2272 | 2873 | SEQ ID NO: 32 | E15S | 307 |
| 2181 | 2782 | SEQ ID NO: 30 | H16N | 216 | 2273 | 2874 | SEQ ID NO: 32 | H16N | 308 |
| 2182 | 2783 | SEQ ID NO: 30 | H16T | 217 | 2274 | 2875 | SEQ ID NO: 32 | H16T | 309 |
| 2183 | 2784 | SEQ ID NO: 30 | H16Y | 218 | 2275 | 2876 | SEQ ID NO: 32 | H16Y | 310 |
| 2184 | 2785 | SEQ ID NO: 30 | H16A | 219 | 2276 | 2877 | SEQ ID NO: 32 | H16A | 311 |
| 2185 | 2786 | SEQ ID NO: 30 | H16E | 220 | 2277 | 2878 | SEQ ID NO: 32 | H16E | 312 |
| 2186 | 2787 | SEQ ID NO: 30 | H16D | 221 | 2278 | 2879 | SEQ ID NO: 32 | H16D | 313 |
| 2187 | 2788 | SEQ ID NO: 30 | H16R | 222 | 2279 | 2880 | SEQ ID NO: 32 | H16R | 314 |
| 2188 | 2789 | SEQ ID NO: 30 | L19D | 223 | 2280 | 2881 | SEQ ID NO: 32 | L19D | 315 |
| 2189 | 2790 | SEQ ID NO: 30 | L19E | 224 | 2281 | 2882 | SEQ ID NO: 32 | L19E | 316 |
| 2190 | 2791 | SEQ ID NO: 30 | L19R | 225 | 2282 | 2883 | SEQ ID NO: 32 | L19R | 317 |
| 2191 | 2792 | SEQ ID NO: 30 | L19S | 226 | 2283 | 2884 | SEQ ID NO: 32 | L19S | 318 |
| 2192 | 2793 | SEQ ID NO: 30 | D20N | 227 | 2284 | 2885 | SEQ ID NO: 32 | D20N | 319 |
| 2193 | 2794 | SEQ ID NO: 30 | D20Q | 228 | 2285 | 2886 | SEQ ID NO: 32 | D20Q | 320 |
| 2194 | 2795 | SEQ ID NO: 30 | D20E | 229 | 2286 | 2887 | SEQ ID NO: 32 | D20E | 321 |
| 2195 | 2796 | SEQ ID NO: 30 | D20A | 230 | 2287 | 2888 | SEQ ID NO: 32 | D20A | 322 |
| 2196 | 2797 | SEQ ID NO: 30 | D20R | 231 | 2288 | 2889 | SEQ ID NO: 32 | D20R | 323 |
| 2197 | 2798 | SEQ ID NO: 30 | D20S | 232 | 2289 | 2890 | SEQ ID NO: 32 | D20S | 324 |
| 2198 | 2799 | SEQ ID NO: 30 | D84N | 233 | 2290 | 2891 | SEQ ID NO: 32 | D84N | 325 |
| 2199 | 2800 | SEQ ID NO: 30 | D84E | 234 | 2291 | 2892 | SEQ ID NO: 32 | D84E | 326 |
| 2200 | 2801 | SEQ ID NO: 30 | D84Q | 235 | 2292 | 2893 | SEQ ID NO: 32 | D84Q | 327 |
| 2201 | 2802 | SEQ ID NO: 30 | D84T | 236 | 2293 | 2894 | SEQ ID NO: 32 | D84T | 328 |
| 2202 | 2803 | SEQ ID NO: 30 | D84S | 237 | 2294 | 2895 | SEQ ID NO: 32 | D84S | 329 |
| 2203 | 2804 | SEQ ID NO: 30 | D84R | 238 | 2295 | 2896 | SEQ ID NO: 32 | D84R | 330 |
| 2204 | 2805 | SEQ ID NO: 30 | D84G | 239 | 2296 | 2897 | SEQ ID NO: 32 | D84G | 331 |
| 2205 | 2806 | SEQ ID NO: 30 | D84M | 240 | 2297 | 2898 | SEQ ID NO: 32 | D84M | 332 |
| 2206 | 2807 | SEQ ID NO: 30 | D84F | 241 | 2298 | 2899 | SEQ ID NO: 32 | D84F | 333 |
| 2207 | 2808 | SEQ ID NO: 30 | D84L | 242 | 2299 | 2900 | SEQ ID NO: 32 | D84L | 334 |
| 2208 | 2809 | SEQ ID NO: 30 | D84K | 243 | 2300 | 2901 | SEQ ID NO: 32 | D84K | 335 |
| 2209 | 2810 | SEQ ID NO: 30 | D84H | 244 | 2301 | 2902 | SEQ ID NO: 32 | D84H | 336 |
| 2210 | 2811 | SEQ ID NO: 30 | S87T | 245 | 2302 | 2903 | SEQ ID NO: 32 | S87T | 337 |
| 2211 | 2812 | SEQ ID NO: 30 | S87R | 246 | 2303 | 2904 | SEQ ID NO: 32 | S87R | 338 |
| 2212 | 2813 | SEQ ID NO: 30 | S87K | 247 | 2304 | 2905 | SEQ ID NO: 32 | S87K | 339 |
| 2213 | 2814 | SEQ ID NO: 30 | S87L | 248 | 2305 | 2906 | SEQ ID NO: 32 | S87L | 340 |
| 2214 | 2815 | SEQ ID NO: 30 | S87M | 249 | 2306 | 2907 | SEQ ID NO: 32 | S87M | 341 |
| 2215 | 2816 | SEQ ID NO: 30 | S87H | 250 | 2307 | 2908 | SEQ ID NO: 32 | S87H | 342 |
| 2216 | 2817 | SEQ ID NO: 30 | N88D | 251 | 2308 | 2909 | SEQ ID NO: 32 | N88D | 343 |
| 2217 | 2818 | SEQ ID NO: 30 | N88T | 252 | 2309 | 2910 | SEQ ID NO: 32 | N88T | 344 |
| 2218 | 2819 | SEQ ID NO: 30 | N88Q | 253 | 2310 | 2911 | SEQ ID NO: 32 | N88Q | 345 |
| 2219 | 2820 | SEQ ID NO: 30 | N88R | 254 | 2311 | 2912 | SEQ ID NO: 32 | N88R | 346 |
| 2220 | 2821 | SEQ ID NO: 30 | N88E | 255 | 2312 | 2913 | SEQ ID NO: 32 | N88E | 347 |
| 2221 | 2822 | SEQ ID NO: 30 | N88K | 256 | 2313 | 2914 | SEQ ID NO: 32 | N88K | 348 |
| 2222 | 2823 | SEQ ID NO: 30 | N88H | 257 | 2314 | 2915 | SEQ ID NO: 32 | N88H | 349 |
| 2223 | 2824 | SEQ ID NO: 30 | N88M | 258 | 2315 | 2916 | SEQ ID NO: 32 | N88M | 350 |
| 2224 | 2825 | SEQ ID NO: 30 | N88S | 259 | 2316 | 2917 | SEQ ID NO: 32 | N88S | 351 |
| 2225 | 2826 | SEQ ID NO: 30 | N88L | 260 | 2317 | 2918 | SEQ ID NO: 32 | N88L | 352 |
| 2226 | 2827 | SEQ ID NO: 30 | V91I | 261 | 2318 | 2919 | SEQ ID NO: 32 | V91I | 353 |
| 2227 | 2828 | SEQ ID NO: 30 | V91L | 262 | 2319 | 2920 | SEQ ID NO: 32 | V91L | 354 |
| 2228 | 2829 | SEQ ID NO: 30 | V91D | 263 | 2320 | 2921 | SEQ ID NO: 32 | V91D | 355 |
| 2229 | 2830 | SEQ ID NO: 30 | V91E | 264 | 2321 | 2922 | SEQ ID NO: 32 | V91E | 356 |
| 2230 | 2831 | SEQ ID NO: 30 | V91N | 265 | 2322 | 2923 | SEQ ID NO: 32 | V91N | 357 |
| 2231 | 2832 | SEQ ID NO: 30 | V91Q | 266 | 2323 | 2924 | SEQ ID NO: 32 | V91Q | 358 |
| 2232 | 2833 | SEQ ID NO: 30 | V91S | 267 | 2324 | 2925 | SEQ ID NO: 32 | V91S | 359 |
| 2233 | 2834 | SEQ ID NO: 30 | V91H | 268 | 2325 | 2926 | SEQ ID NO: 32 | V91H | 360 |
| 2234 | 2835 | SEQ ID NO: 30 | I92E | 269 | 2326 | 2927 | SEQ ID NO: 32 | I92E | 361 |
| 2235 | 2836 | SEQ ID NO: 30 | I92T | 270 | 2327 | 2928 | SEQ ID NO: 32 | I92T | 362 |
| 2236 | 2837 | SEQ ID NO: 30 | I92K | 271 | 2328 | 2929 | SEQ ID NO: 32 | I92K | 363 |
| 2237 | 2838 | SEQ ID NO: 30 | I92R | 272 | 2329 | 2930 | SEQ ID NO: 32 | I92R | 364 |
| 2238 | 2839 | SEQ ID NO: 30 | I92L | 273 | 2330 | 2931 | SEQ ID NO: 32 | I92L | 365 |
| 2239 | 2840 | SEQ ID NO: 30 | E95Q | 274 | 2331 | 2932 | SEQ ID NO: 32 | E95Q | 366 |
| 2240 | 2841 | SEQ ID NO: 30 | E95G | 275 | 2332 | 2933 | SEQ ID NO: 32 | E95G | 367 |
| 2241 | 2842 | SEQ ID NO: 30 | E95D | 276 | 2333 | 2934 | SEQ ID NO: 32 | E95D | 368 |
| 2242 | 2843 | SEQ ID NO: 30 | E95N | 277 | 2334 | 2935 | SEQ ID NO: 32 | E95N | 369 |
| 2243 | 2844 | SEQ ID NO: 30 | Q126E | 278 | 2335 | 2936 | SEQ ID NO: 32 | Q126E | 370 |
| 2244 | 2845 | SEQ ID NO: 30 | Q126D | 279 | 2336 | 2937 | SEQ ID NO: 32 | Q126D | 371 |
| 2245 | 2846 | SEQ ID NO: 30 | Q126A | 280 | 2337 | 2938 | SEQ ID NO: 32 | Q126A | 372 |
| 2246 | 2847 | SEQ ID NO: 30 | Q126S | 281 | 2338 | 2939 | SEQ ID NO: 32 | Q126S | 373 |
| 2247 | 2848 | SEQ ID NO: 30 | D84N + E95Q | 282 | 2339 | 2940 | SEQ ID NO: 32 | D84N + E95Q | 374 |
| 2248 | 2849 | SEQ ID NO: 30 | D84E + E95Q | 283 | 2340 | 2941 | SEQ ID NO: 32 | D84E + E95Q | 375 |
| 2249 | 2850 | SEQ ID NO: 30 | D84T + E95Q | 284 | 2341 | 2942 | SEQ ID NO: 32 | D84T + E95Q | 376 |
| 2250 | 2851 | SEQ ID NO: 30 | D84Q + E95Q | 285 | 2342 | 2943 | SEQ ID NO: 32 | D84Q + E95Q | 377 |
| 2251 | 2852 | SEQ ID NO: 30 | D84T + H16T | 286 | 2343 | 2944 | SEQ ID NO: 32 | D84T + H16T | 378 |
| 2252 | 2853 | SEQ ID NO: 30 | D84N + V91I | 287 | 2344 | 2945 | SEQ ID NO: 32 | D84N + V91I | 379 |
| 2253 | 2854 | SEQ ID NO: 30 | D84T + Q126E | 288 | 2345 | 2946 | SEQ ID NO: 32 | D84T + Q126E | 380 |
| 2254 | 2855 | SEQ ID NO: 30 | D84N + Q126E | 289 | 2346 | 2947 | SEQ ID NO: 32 | D84N + Q126E | 381 |
| 2255 | 2856 | SEQ ID NO: 30 | H16T + D84Q | 290 | 2347 | 2948 | SEQ ID NO: 32 | H16T + D84Q | 382 |
| 2256 | 2857 | SEQ ID NO: 30 | H16T + V91I | 291 | 2348 | 2949 | SEQ ID NO: 32 | H16T + V91I | 383 |
| 2257 | 2858 | SEQ ID NO: 31 | | 292 | | | | | |
| 2258 | 2859 | SEQ ID NO: 31 | D84N | 293 | | | | | |
| 2259 | 2860 | SEQ ID NO: 31 | D84Q | 294 | | | | | |
| 2260 | 2861 | SEQ ID NO: 31 | E95N | 295 | | | | | |
| 2261 | 2862 | SEQ ID NO: 31 | D84N + E95N | 296 | | | | | |
| 2262 | 2863 | SEQ ID NO: 31 | H16N | 297 | | | | | |
| 2263 | 2864 | SEQ ID NO: 31 | H16N + D84N | 298 | | | | | |
| 2349 | 2950 | SEQ ID NO: 33 | | 384 | 2434 | 3035 | SEQ ID NO: 34 | | 469 |
| 2350 | 2951 | SEQ ID NO: 33 | L12R | 385 | 2435 | 3036 | SEQ ID NO: 34 | L12R | 470 |
| 2351 | 2952 | SEQ ID NO: 33 | L12K | 386 | 2436 | 3037 | SEQ ID NO: 34 | L12K | 471 |
| 2352 | 2953 | SEQ ID NO: 33 | L12E | 387 | 2437 | 3038 | SEQ ID NO: 34 | L12E | 472 |
| 2353 | 2954 | SEQ ID NO: 33 | L12Q | 388 | 2438 | 3039 | SEQ ID NO: 34 | L12Q | 473 |
| 2354 | 2955 | SEQ ID NO: 33 | E15Q | 389 | 2439 | 3040 | SEQ ID NO: 34 | E15Q | 474 |
| 2355 | 2956 | SEQ ID NO: 33 | E15R | 390 | 2440 | 3041 | SEQ ID NO: 34 | E15R | 475 |
| 2356 | 2957 | SEQ ID NO: 33 | E15A | 391 | 2441 | 3042 | SEQ ID NO: 34 | E15A | 476 |
| 2357 | 2958 | SEQ ID NO: 33 | E15S | 392 | 2442 | 3043 | SEQ ID NO: 34 | E15S | 477 |
| 2358 | 2959 | SEQ ID NO: 33 | H16N | 393 | 2443 | 3044 | SEQ ID NO: 34 | H16N | 478 |
| 2359 | 2960 | SEQ ID NO: 33 | H16T | 394 | 2444 | 3045 | SEQ ID NO: 34 | H16T | 479 |
| 2360 | 2961 | SEQ ID NO: 33 | H16Y | 395 | 2445 | 3046 | SEQ ID NO: 34 | H16Y | 480 |
| 2361 | 2962 | SEQ ID NO: 33 | H16A | 396 | 2446 | 3047 | SEQ ID NO: 34 | H16A | 481 |
| 2362 | 2963 | SEQ ID NO: 33 | H16E | 397 | 2447 | 3048 | SEQ ID NO: 34 | H16E | 482 |
| 2363 | 2964 | SEQ ID NO: 33 | H16D | 398 | 2448 | 3049 | SEQ ID NO: 34 | H16D | 483 |
| 2364 | 2965 | SEQ ID NO: 33 | H16R | 399 | 2449 | 3050 | SEQ ID NO: 34 | H16R | 484 |
| 2365 | 2966 | SEQ ID NO: 33 | L19D | 400 | 2450 | 3051 | SEQ ID NO: 34 | L19D | 485 |
| 2366 | 2967 | SEQ ID NO: 33 | L19E | 401 | 2451 | 3052 | SEQ ID NO: 34 | L19E | 486 |
| 2367 | 2968 | SEQ ID NO: 33 | L19R | 402 | 2452 | 3053 | SEQ ID NO: 34 | L19R | 487 |
| 2368 | 2969 | SEQ ID NO: 33 | L19S | 403 | 2453 | 3054 | SEQ ID NO: 34 | L19S | 488 |
| 2369 | 2970 | SEQ ID NO: 33 | D20N | 404 | 2454 | 3055 | SEQ ID NO: 34 | D20N | 489 |
| 2370 | 2971 | SEQ ID NO: 33 | D20Q | 405 | 2455 | 3056 | SEQ ID NO: 34 | D20Q | 490 |
| 2371 | 2972 | SEQ ID NO: 33 | D20E | 406 | 2456 | 3057 | SEQ ID NO: 34 | D20E | 491 |
| 2372 | 2973 | SEQ ID NO: 33 | D20A | 407 | 2457 | 3058 | SEQ ID NO: 34 | D20A | 492 |
| 2373 | 2974 | SEQ ID NO: 33 | D20R | 408 | 2458 | 3059 | SEQ ID NO: 34 | D20R | 493 |
| 2374 | 2975 | SEQ ID NO: 33 | D20S | 409 | 2459 | 3060 | SEQ ID NO: 34 | D20S | 494 |
| 2375 | 2976 | SEQ ID NO: 33 | D84N | 410 | 2460 | 3061 | SEQ ID NO: 34 | D84N | 495 |
| 2376 | 2977 | SEQ ID NO: 33 | D84E | 411 | 2461 | 3062 | SEQ ID NO: 34 | D84E | 496 |
| 2377 | 2978 | SEQ ID NO: 33 | D84Q | 412 | 2462 | 3063 | SEQ ID NO: 34 | D84Q | 497 |
| 2378 | 2979 | SEQ ID NO: 33 | D84T | 413 | 2463 | 3064 | SEQ ID NO: 34 | D84T | 498 |
| 2379 | 2980 | SEQ ID NO: 33 | D84S | 414 | 2464 | 3065 | SEQ ID NO: 34 | D84S | 499 |
| 2380 | 2981 | SEQ ID NO: 33 | D84R | 415 | 2465 | 3066 | SEQ ID NO: 34 | D84R | 500 |
| 2381 | 2982 | SEQ ID NO: 33 | D84G | 416 | 2466 | 3067 | SEQ ID NO: 34 | D84G | 501 |
| 2382 | 2983 | SEQ ID NO: 33 | D84M | 417 | 2467 | 3068 | SEQ ID NO: 34 | D84M | 502 |
| 2383 | 2984 | SEQ ID NO: 33 | D84F | 418 | 2468 | 3069 | SEQ ID NO: 34 | D84F | 503 |
| 2384 | 2985 | SEQ ID NO: 33 | D84L | 419 | 2469 | 3070 | SEQ ID NO: 34 | D84L | 504 |
| 2385 | 2986 | SEQ ID NO: 33 | D84K | 420 | 2470 | 3071 | SEQ ID NO: 34 | D84K | 505 |
| 2386 | 2987 | SEQ ID NO: 33 | D84H | 421 | 2471 | 3072 | SEQ ID NO: 34 | D84H | 506 |
| 2387 | 2988 | SEQ ID NO: 33 | S87T | 422 | 2472 | 3073 | SEQ ID NO: 34 | S87T | 507 |
| 2388 | 2989 | SEQ ID NO: 33 | S87R | 423 | 2473 | 3074 | SEQ ID NO: 34 | S87R | 508 |
| 2389 | 2990 | SEQ ID NO: 33 | S87K | 424 | 2474 | 3075 | SEQ ID NO: 34 | S87K | 509 |
| 2390 | 2991 | SEQ ID NO: 33 | S87L | 425 | 2475 | 3076 | SEQ ID NO: 34 | S87L | 510 |
| 2391 | 2992 | SEQ ID NO: 33 | S87M | 426 | 2476 | 3077 | SEQ ID NO: 34 | S87M | 511 |
| 2392 | 2993 | SEQ ID NO: 33 | S87H | 427 | 2477 | 3078 | SEQ ID NO: 34 | S87H | 512 |
| 2393 | 2994 | SEQ ID NO: 33 | N88D | 428 | 2478 | 3079 | SEQ ID NO: 34 | N88D | 513 |
| 2394 | 2995 | SEQ ID NO: 33 | N88T | 429 | 2479 | 3080 | SEQ ID NO: 34 | N88T | 514 |
| 2395 | 2996 | SEQ ID NO: 33 | N88Q | 430 | 2480 | 3081 | SEQ ID NO: 34 | N88Q | 515 |
| 2396 | 2997 | SEQ ID NO: 33 | N88R | 431 | 2481 | 3082 | SEQ ID NO: 34 | N88R | 516 |
| 2397 | 2998 | SEQ ID NO: 33 | N88E | 432 | 2482 | 3083 | SEQ ID NO: 34 | N88E | 517 |
| 2398 | 2999 | SEQ ID NO: 33 | N88K | 433 | 2483 | 3084 | SEQ ID NO: 34 | N88K | 518 |
| 2399 | 3000 | SEQ ID NO: 33 | N88H | 434 | 2484 | 3085 | SEQ ID NO: 34 | N88H | 519 |
| 2400 | 3001 | SEQ ID NO: 33 | N88M | 435 | 2485 | 3086 | SEQ ID NO: 34 | N88M | 520 |
| 2401 | 3002 | SEQ ID NO: 33 | N88S | 436 | 2486 | 3087 | SEQ ID NO: 34 | N88S | 521 |
| 2402 | 3003 | SEQ ID NO: 33 | N88L | 437 | 2487 | 3088 | SEQ ID NO: 34 | N88L | 522 |
| 2403 | 3004 | SEQ ID NO: 33 | V91I | 438 | 2488 | 3089 | SEQ ID NO: 34 | V91I | 523 |
| 2404 | 3005 | SEQ ID NO: 33 | V91L | 439 | 2489 | 3090 | SEQ ID NO: 34 | V91L | 524 |
| 2405 | 3006 | SEQ ID NO: 33 | V91D | 440 | 2490 | 3091 | SEQ ID NO: 34 | V91D | 525 |
| 2406 | 3007 | SEQ ID NO: 33 | V91E | 441 | 2491 | 3092 | SEQ ID NO: 34 | V91E | 526 |
| 2407 | 3008 | SEQ ID NO: 33 | V91N | 442 | 2492 | 3093 | SEQ ID NO: 34 | V91N | 527 |
| 2408 | 3009 | SEQ ID NO: 33 | V91Q | 443 | 2493 | 3094 | SEQ ID NO: 34 | V91Q | 528 |
| 2409 | 3010 | SEQ ID NO: 33 | V91S | 444 | 2494 | 3095 | SEQ ID NO: 34 | V91S | 529 |
| 2410 | 3011 | SEQ ID NO: 33 | V91H | 445 | 2495 | 3096 | SEQ ID NO: 34 | V91H | 530 |
| 2411 | 3012 | SEQ ID NO: 33 | I92E | 446 | 2496 | 3097 | SEQ ID NO: 34 | I92E | 531 |
| 2412 | 3013 | SEQ ID NO: 33 | I92T | 447 | 2497 | 3098 | SEQ ID NO: 34 | I92T | 532 |
| 2413 | 3014 | SEQ ID NO: 33 | I92K | 448 | 2498 | 3099 | SEQ ID NO: 34 | I92K | 533 |
| 2414 | 3015 | SEQ ID NO: 33 | I92R | 449 | 2499 | 3100 | SEQ ID NO: 34 | I92R | 534 |
| 2415 | 3016 | SEQ ID NO: 33 | I92L | 450 | 2500 | 3101 | SEQ ID NO: 34 | I92L | 535 |
| 2416 | 3017 | SEQ ID NO: 33 | E95Q | 451 | 2501 | 3102 | SEQ ID NO: 34 | E95Q | 536 |
| 2417 | 3018 | SEQ ID NO: 33 | E95G | 452 | 2502 | 3103 | SEQ ID NO: 34 | E95G | 537 |
| 2418 | 3019 | SEQ ID NO: 33 | E95D | 453 | 2503 | 3104 | SEQ ID NO: 34 | E95D | 538 |
| 2419 | 3020 | SEQ ID NO: 33 | E95N | 454 | 2504 | 3105 | SEQ ID NO: 34 | E95N | 539 |
| 2420 | 3021 | SEQ ID NO: 33 | Q126E | 455 | 2505 | 3106 | SEQ ID NO: 34 | Q126E | 540 |
| 2421 | 3022 | SEQ ID NO: 33 | Q126D | 456 | 2506 | 3107 | SEQ ID NO: 34 | Q126D | 541 |
| 2422 | 3023 | SEQ ID NO: 33 | Q126A | 457 | 2507 | 3108 | SEQ ID NO: 34 | Q126A | 542 |
| 2423 | 3024 | SEQ ID NO: 33 | Q126S | 458 | 2508 | 3109 | SEQ ID NO: 34 | Q126S | 543 |
| 2424 | 3025 | SEQ ID NO: 33 | D84N + E95Q | 459 | 2509 | 3110 | SEQ ID NO: 34 | D84N + E95Q | 544 |
| 2425 | 3026 | SEQ ID NO: 33 | D84E + E95Q | 460 | 2510 | 3111 | SEQ ID NO: 34 | D84E + E95Q | 545 |
| 2426 | 3027 | SEQ ID NO: 33 | D84T + E95Q | 461 | 2511 | 3112 | SEQ ID NO: 34 | D84T + E95Q | 546 |
| 2427 | 3028 | SEQ ID NO: 33 | D84Q + E95Q | 462 | 2512 | 3113 | SEQ ID NO: 34 | D84Q + E95Q | 547 |
| 2428 | 3029 | SEQ ID NO: 33 | D84T + H16T | 463 | 2513 | 3114 | SEQ ID NO: 34 | D84T + H16T | 548 |
| 2429 | 3030 | SEQ ID NO: 33 | D84N + V91I | 464 | 2514 | 3115 | SEQ ID NO: 34 | D84N +V91I | 549 |
| 2430 | 3031 | SEQ ID NO: 33 | D84T + Q126E | 465 | 2515 | 3116 | SEQ ID NO: 34 | D84T + Q126E | 550 |
| 2431 | 3032 | SEQ ID NO: 33 | D84N + Q126E | 466 | 2516 | 3117 | SEQ ID NO: 34 | D84N + Q126E | 551 |
| 2432 | 3033 | SEQ ID NO: 33 | H16T + D84Q | 467 | 2517 | 3118 | SEQ ID NO: 34 | H16T + D84Q | 552 |
| 2433 | 3034 | SEQ ID NO: 33 | H16T + V91I | 468 | 2518 | 3119 | SEQ ID NO: 34 | H16T + V91I | 553 |
| 2519 | 3120 | SEQ ID NO: 35 | | 554 | 2561 | 3164 | SEQ ID NO: 35 | N88D | 598 |
| 2518 | 3121 | SEQ ID NO: 35 | L12R | 555 | 2562 | 3165 | SEQ ID NO: 35 | N88T | 599 |
| 2519 | 3122 | SEQ ID NO: 35 | L12K | 556 | 2563 | 3166 | SEQ ID NO: 35 | N88Q | 600 |
| 2520 | 3123 | SEQ ID NO: 35 | L12E | 557 | 2564 | 3167 | SEQ ID NO: 35 | N88R | 601 |
| 2521 | 3124 | SEQ ID NO: 35 | L12Q | 558 | 2565 | 3168 | SEQ ID NO: 35 | N88E | 602 |
| 2522 | 3125 | SEQ ID NO: 35 | E15Q | 559 | 2566 | 3169 | SEQ ID NO: 35 | N88K | 603 |
| 2523 | 3126 | SEQ ID NO: 35 | E15R | 560 | 2567 | 3170 | SEQ ID NO: 35 | N88H | 604 |
| 2524 | 3127 | SEQ ID NO: 35 | E15A | 561 | 2568 | 3171 | SEQ ID NO: 35 | N88M | 605 |
| 2525 | 3128 | SEQ ID NO: 35 | E15S | 562 | 2569 | 3172 | SEQ ID NO: 35 | N88S | 606 |
| 2526 | 3129 | SEQ ID NO: 35 | H16N | 563 | 2570 | 3173 | SEQ ID NO: 35 | N88L | 607 |
| 2527 | 3130 | SEQ ID NO: 35 | H16T | 564 | 2571 | 3174 | SEQ ID NO: 35 | V91I | 608 |
| 2528 | 3131 | SEQ ID NO: 35 | H16Y | 565 | 2572 | 3175 | SEQ ID NO: 35 | V91L | 609 |
| 2529 | 3132 | SEQ ID NO: 35 | H16A | 566 | 2573 | 3176 | SEQ ID NO: 35 | V91D | 610 |
| 2530 | 3133 | SEQ ID NO: 35 | H16E | 567 | 2574 | 3177 | SEQ ID NO: 35 | V91E | 611 |
| 2531 | 3134 | SEQ ID NO: 35 | H16D | 568 | 2575 | 3178 | SEQ ID NO: 35 | V91N | 612 |
| 2532 | 3135 | SEQ ID NO: 35 | H16R | 569 | 2576 | 3179 | SEQ ID NO: 35 | V91Q | 613 |
| 2533 | 3136 | SEQ ID NO: 35 | L19D | 570 | 2577 | 3180 | SEQ ID NO: 35 | V91S | 614 |
| 2534 | 3137 | SEQ ID NO: 35 | L19E | 571 | 2578 | 3181 | SEQ ID NO: 35 | V91H | 615 |
| 2535 | 3138 | SEQ ID NO: 35 | L19R | 572 | 2579 | 3182 | SEQ ID NO: 35 | I92E | 616 |
| 2536 | 3139 | SEQ ID NO: 35 | L19S | 573 | 2580 | 3183 | SEQ ID NO: 35 | I92T | 617 |
| 2537 | 3140 | SEQ ID NO: 35 | D20N | 574 | 2581 | 3184 | SEQ ID NO: 35 | I92K | 618 |
| 2538 | 3141 | SEQ ID NO: 35 | D20Q | 575 | 2582 | 3185 | SEQ ID NO: 35 | I92R | 619 |
| 2539 | 3142 | SEQ ID NO: 35 | D20E | 576 | 2583 | 3186 | SEQ ID NO: 35 | I92L | 620 |
| 2540 | 3143 | SEQ ID NO: 35 | D20A | 577 | 2584 | 3187 | SEQ ID NO: 35 | E95Q | 621 |
| 2541 | 3144 | SEQ ID NO: 35 | D20R | 578 | 2585 | 3188 | SEQ ID NO: 35 | E95G | 622 |
| 2542 | 3145 | SEQ ID NO: 35 | D20S | 579 | 2586 | 3189 | SEQ ID NO: 35 | E95D | 623 |
| 2543 | 3146 | SEQ ID NO: 35 | D84N | 580 | 2587 | 3190 | SEQ ID NO: 35 | E95N | 624 |
| 2544 | 3147 | SEQ ID NO: 35 | D84E | 581 | 2588 | 3191 | SEQ ID NO: 35 | Q126E | 625 |
| 2545 | 3148 | SEQ ID NO: 35 | D84Q | 582 | 2589 | 3192 | SEQ ID NO: 35 | Q126D | 626 |
| 2546 | 3149 | SEQ ID NO: 35 | D84T | 583 | 2590 | 3193 | SEQ ID NO: 35 | Q126A | 627 |
| 2547 | 3150 | SEQ ID NO: 35 | D84S | 584 | 2591 | 3194 | SEQ ID NO: 35 | Q126S | 628 |
| 2548 | 3151 | SEQ ID NO: 35 | D84R | 585 | 2592 | 3195 | SEQ ID NO: 35 | D84N + E95Q | 629 |
| 2549 | 3152 | SEQ ID NO: 35 | D84G | 586 | 2593 | 3196 | SEQ ID NO: 35 | D84E + E95Q | 630 |
| 2550 | 3153 | SEQ ID NO: 35 | D84M | 587 | 2594 | 3197 | SEQ ID NO: 35 | D84T + E95Q | 631 |
| 2551 | 3154 | SEQ ID NO: 35 | D84F | 588 | 2595 | 3198 | SEQ ID NO: 35 | D84Q + E95Q | 632 |
| 2552 | 3155 | SEQ ID NO: 35 | D84L | 589 | 2596 | 3199 | SEQ ID NO: 35 | D84T + H16T | 633 |
| 2553 | 3156 | SEQ ID NO: 35 | D84K | 590 | 2597 | 3200 | SEQ ID NO: 35 | D84N + V91I | 634 |
| 2554 | 3157 | SEQ ID NO: 35 | D84H | 591 | 2598 | 3201 | SEQ ID NO: 35 | D84T + Q126E | 635 |
| 2555 | 3158 | SEQ ID NO: 35 | S87T | 592 | 2599 | 3202 | SEQ ID NO: 35 | D84N + Q126E | 636 |
| 2556 | 3159 | SEQ ID NO: 35 | S87R | 593 | 2600 | 3203 | SEQ ID NO: 35 | H16T + D84Q | 637 |
| 2557 | 3160 | SEQ ID NO: 35 | S87K | 594 | 2601 | 3204 | SEQ ID NO: 35 | H16T + V91I | 638 |
| 2558 | 3161 | SEQ ID NO: 35 | S87L | 595 | | | | | |
| 2559 | 3162 | SEQ ID NO: 35 | S87M | 596 | | | | | |
| 2560 | 3163 | SEQ ID NO: 35 | S87H | 597 | | | | | |

The application's sequence listing, which the Patent Office published only in electronic form, follows.

SEQUENCE LISTING (638 sequences)

SEQ ID NO: 1 - protein, 133 aa, artificial sequence
  synthetic sequence
APTSSSTKKTQLQLEHLLLDLQMILNGINNYKNPKLTRMLTFKFYMPKKATELKHLQCLEEELKPLEEVLNLAQSKNFHLRPRDLISNINVIVLELKGSETTFMCEYADETATIVEFLNRWITFSQSIISTLT

SEQ ID NO: 2 - protein, 153 aa, artificial sequence
  synthetic sequence
MYRMQLLSCIALSLALVTNSAPTSSSTKKTQLQLEHLLLDLQMILNGINNYKNPKLTRMLTFKFYMPKKATELKHLQCLEEELKPLEEVLNLAQSKNFHLRPRDLISNINVIVLELKGSETTFMCEYADETATIVEFLNRWITFCQSIISTLT

SEQ ID NO: 3 - protein, 133 aa, artificial sequence [sequence omitted]

SEQ ID NO: 4 - protein, 133 aa, artificial sequence
  synthetic sequence
APTSSSTKKTQLQLEHLLLDLQMILNGINNYKNPKLTDMLTFEFYMPKKATELKHLQCLERELKPLEEVLNLAQSKNFHLRPRDLISNINVIVLELKGSETTFMCEYADETATIVEFLNRWITFSQSIISTLT

SEQ ID NO: 5 - protein, 217 aa, artificial sequence
  IL-2 receptor sequence
ELCDDDPPEIPHATFKAMAYKEGTMLNCECKRGFRRIKSGSLYMLCTGNSSHSSWDNQCQCTSSATRNTTKQVTPQPEEQKERKTTEMQSPMQPVDQASLPGHCREPPPWENEATERIYHFVVGQMVYYQCVQGYRALHRGPAESVCKMTHGKTRWTQPQLICTGEMETSQFPGEEKPQASPEGRPESETSCLVTTGLNDIFEAQKIEWHEHHHHHH

SEQ ID NO: 6 - protein, 235 aa, artificial sequence
  IL-2 receptor sequence
AVNGTSQFTCFYNSRANISCVWSQDGALQDTSCQVHAWPDRRRWNQTCELLPVSQASWACNLILGAPDSQKLTTVDIVTLRVLCREGVRWRVMAIQDFKPFENLRLMAPISLQVVHVETHRCNISWEISQASHYFERHLEFEARTLSPGHTWEEAPLLTLKQKQEWICLETLTPDTQYEFQVRVKPLQGEFTTWSPWSQPLAFRTKPAALGKDTGLNDIFEAQKIEWHEHHHHHH

SEQ ID NO: 7 - protein, 456 aa, artificial sequence
  IL-2R-Fc.Knob sequence
AVNGTSQFTCFYNSRANISCVWSQDGALQDTSCQVHAWPDRRRWNQTCELLPVSQASWACNLILGAPDSQKLTTVDIVTLRVLCREGVRWRVMAIQDFKPFENLRLMAPISLQVVHVETHRCNISWEISQASHYFERHLEFEARTLSPGHTWEEAPLLTLKQKQEWICLETLTPDTQYEFQVRVKPLQGEFTTWSPWSQPLAFRTKPAALGKDTGLNDIFEAQKIEWHEDKTHTCPPCPAPEAAGGPSVFLFPPKPKDTLMISRTPEVTCVVVDVSHEDPEVKFNWYVDGVEVHNAKTKPREEQYNSTYRVVSVLTVLHQDWLNGKEYKCKVSNKALPAPIEKTISKAKGQPREPQVYTLPPCRDELTKNQVSLWCLVKGFYPSDIAVEWESNGQPENNYKTTPPVLDSDGSFFLYSKLTVDKSRWQQGNVFSCSVMHEALHNHYTQKSLSLSPGK

SEQ ID NO: 8 - protein, 481 aa, artificial sequence
  IL-2R-Fc.Hole sequence
LNTTILTPNGNEDTTADFFLTTMPTDSLSVSTLPLPEVQCFVFNVEYMNCTWNSSSEPQPTNLTLHYWYKNSDNDKVQKCSHYLFSEEITSGCQLQKKEIHLYQTFVVQLQDPREPRRQATQMLKLQNLVIPWAPENLTLHKLSESQLELNWNNRFLNHCLEHLVQYRTDWDHSWTEQSVDYRHKFSLPSVDGQKRYTFRVRSRFNPLCGSAQHWSEWSHPIHWGSNTSKENGLNDIFEAQKIEWHEHHHHHHHDKTHTCPPCPAPEAAGGPSVFLFPPKPKDTLMISRTPEVTCVVVDVSHEDPEVKFNWYVDGVEVHNAKTKPREEQYNSTYRVVSVLTVLHQDWLNGKEYKCKVSNKALPAPIEKTISKAKGQPREPQVCTLPPSRDELTKNQVSLSCAVKGFYPSDIAVEWESNGQPENNYKTTPPVLDSDGSFFLVSKLTVDKSRWQQGNVFSCSVMHEALHNRYTQKSLSLSPGK

SEQ ID NO: 9 - protein, 227 aa, artificial sequence
  Fc sequence
DKTHTCPPCPAPEAAGGPSVFLFPPKPKDTLMISRTPEVTCVVVDVSHEDPEVKFNWYVDGVEVHNAKTKPREEQYNSTYRVVSVLTVLHQDWLNGKEYKCKVSNKALPAPIEKTISKAKGQPREPQVYTLPPCRDELTKNQVSLWCLVKGFYPSDIAVEWESNGQPENNYKTTPPVLDSDGSFFLYSKLTVDKSRWQQGNVFSCSVMHEALHNHYTQKSLSLSPGK

SEQ ID NO: 10 - protein, 232 aa, artificial sequence
  Fc sequence
EPKASDKTHTCPPCPAPEAAGGPSVFLFPPKPKDTLMISRTPEVTCVVVDVSHEDPEVKFNWYVDGVEVHNAKTKPREEQYNSTYRVVSVLTVLHQDWLNGKEYKCKVSNKALPAPIEKTISKAKGQPREPQVCTLPPSRDELTKNQVSLSCAVKGFYPSDIAVEWESNGQPENNYKTTPPVLDSDGSFFLVSKLTVDKSRWQQGNVFSCSVMHEALHNHYTQKSLSLSPGK

SEQ ID NO: 11 - protein, 227 aa, artificial sequence
  Fc sequence
DKTHTCPPCPAPEAAGGPSVFLFPPKPKDTLMISRTPEVTCVVVDVSHEDPEVKFNWYVDGVEVHNAKTKPREEQYNSTYRVVSVLTVLHQDWLNGKEYKCKVSNKALPAPIEKTISKAKGQPREPQVCTLPPSRDELTKNQVSLSCAVKGFYPSDIAVEWESNGQPENNYKTTPPVLDSDGSFFLVSKLTVDKSRWQQGNVFSCSVMHEALHNRYTQKSLSLSPGK

SEQ ID NO: 12 - protein, 227 aa, artificial sequence
  Fc sequence
DKTHTCPPCPAPEAAGGPSVFLFPPKPKDTLMISRTPEVTCVVVDVSHEDPEVKFNWYVDGVEVHNAKTKPREEQYNSTYRVVSVLTVLHQDWLNGKEYKCKVSNKALPAPIEKTISKAKGQPREPQVYTLPPSREEMTKNQVSLTCLVKGFYPSDIAVEWESNGQPENNYKTTPPVLDSDGSFFLYSKLTVDKSRWQQGNVFSCSVMHEALHNHYTQKSLSLSPGK

SEQ ID NO: 13 - protein, 364 aa, artificial sequence
  IL-2-Fc sequence
APTSSSTKKTQLQLEHLLLDLQMILNGINNYKNPKLTRMLTFKFYMPKKATELKHLQCLEEELKPLEEVLNLAQSKNFHLRPRDLISNINVIVLELKGSETTFMCEYADETATIVEFLNRWITFSQSIISTLTGSGSDKTHTCPPCPAPEAAGGPSVFLFPPKPKDTLMISRTPEVTCVVVDVSHEDPEVKFNWYVDGVEVHNAKTKPREEQYNSTYRVVSVLTVLHQDWLNGKEYKCKVSNKALPAPIEKTISKAKGQPREPQVYTLPPSREEMTKNQVSLTCLVKGFYPSDIAVEWESNGQPENNYKTTPPVLDSDGSFFLYSKLTVDKSRWQQGNVFSCSVMHEALHNHYTQKSLSLSPGK

SEQ ID NO: 14 - protein, 364 aa, artificial sequence
  IL-2-Fc sequence
APTSSSTKKTQLQLEHLLLDLQMILNGINNYKNPKLTDMLTFEFYMPKKATELKHLQCLERELKPLEEVLNLAQSKNFHLRPRDLISNINVIVLELKGSETTFMCEYADETATIVEFLNRWITFSQSIISTLTGSGSDKTHTCPPCPAPEAAGGPSVFLFPPKPKDTLMISRTPEVTCVVVDVSHEDPEVKFNWYVDGVEVHNAKTKPREEQYNSTYRVVSVLTVLHQDWLNGKEYKCKVSNKALPAPIEKTISKAKGQPREPQVYTLPPSREEMTKNQVSLTCLVKGFYPSDIAVEWESNGQPENNYKTTPPVLDSDGSFFLYSKLTVDKSRWQQGNVFSCSVMHEALHNHYTQKSLSLSPGK

SEQ ID NO: 15 - protein, 360 aa, artificial sequence
  IL-2-Fc sequence
APTSSSTKKTQLQLEHLLLDLQMILNGINNYKNPKLTRMLTFKFYMPKKATELKHLQCLEEELKPLEEVLNLSGDASIHDLISNINVIVLELKGSETTFMCEYADETATIVEFLNRWITFSQSIISTLTGSGSDKTHTCPPCPAPEAAGGPSVFLFPPKPKDTLMISRTPEVTCVVVDVSHEDPEVKFNWYVDGVEVHNAKTKPREEQYNSTYRVVSVLTVLHQDWLNGKEYKCKVSNKALPAPIEKTISKAKGQPREPQVYTLPPSREEMTKNQVSLTCLVKGFYPSDIAVEWESNGQPENNYKTTPPVLDSDGSFFLYSKLTVDKSRWQQGNVFSCSVMHEALHNHYTQKSLSLSPGK

SEQ ID NO: 16 - protein, 360 aa, artificial sequence
  IL-2-Fc sequence
APTSSSTKKTQLQLEHLLLDLQMILNGINNYKNPKLTRMLTFKFYMPKKATELKHLQCLEEELKPLEEVLNLAQSKNFHDLISNINVIVLELKGSETTFMCEYADETATIVEFLNRWITFSQSIISTLTGSGSDKTHTCPPCPAPEAAGGPSVFLFPPKPKDTLMISRTPEVTCVVVDVSHEDPEVKFNWYVDGVEVHNAKTKPREEQYNSTYRVVSVLTVLHQDWLNGKEYKCKVSNKALPAPIEKTISKAKGQPREPQVYTLPPSREEMTKNQVSLTCLVKGFYPSDIAVEWESNGQPENNYKTTPPVLDSDGSFFLYSKLTVDKSRWQQGNVFSCSVMHEALHNHYTQKSLSLSPGK

SEQ ID NO: 17 - protein, 360 aa, artificial sequence
  IL-2-Fc sequence
APTSSSTKKTQLQLEHLLLDLQMILNGINNYKNPKLTRMLTFKFYMPKKATELKHLQCLEEELKPLEEVLNLAGSKNFHDLISNINVIVLELKGSETTFMCEYADETATIVEFLNRWITFSQSIISTLTGSGSDKTHTCPPCPAPEAAGGPSVFLFPPKPKDTLMISRTPEVTCVVVDVSHEDPEVKFNWYVDGVEVHNAKTKPREEQYNSTYRVVSVLTVLHQDWLNGKEYKCKVSNKALPAPIEKTISKAKGQPREPQVYTLPPSREEMTKNQVSLTCLVKGFYPSDIAVEWESNGQPENNYKTTPPVLDSDGSFFLYSKLTVDKSRWQQGNVFSCSVMHEALHNHYTQKSLSLSPGK

SEQ ID NO: 18 - protein, 360 aa, artificial sequence
  IL-2-Fc sequence
APTSSSTKKTQLQLEHLLLDLQMILNGINNYKNPKLTRMLTFKFYMPKKATELKHLQCLEEELKPLEEVLNLAQSANFHDLISNINVIVLELKGSETTFMCEYADETATIVEFLNRWITFSQSIISTLTGSGSDKTHTCPPCPAPEAAGGPSVFLFPPKPKDTLMISRTPEVTCVVVDVSHEDPEVKFNWYVDGVEVHNAKTKPREEQYNSTYRVVSVLTVLHQDWLNGKEYKCKVSNKALPAPIEKTISKAKGQPREPQVYTLPPSREEMTKNQVSLTCLVKGFYPSDIAVEWESNGQPENNYKTTPPVLDSDGSFFLYSKLTVDKSRWQQGNVFSCSVMHEALHNHYTQKSLSLSPGK

SEQ ID NO: 19 - protein, 360 aa, artificial sequence
  IL-2-Fc sequence
APTSSSTKKTQLQLEHLLLDLQMILNGINNYKNPKLTRMLTFKFYMPKKATELKHLQCLEEELKPLEEVLNLAQSANIHDLISNINVIVLELKGSETTFMCEYADETATIVEFLNRWITFSQSIISTLTGSGSDKTHTCPPCPAPEAAGGPSVFLFPPKPKDTLMISRTPEVTCVVVDVSHEDPEVKFNWYVDGVEVHNAKTKPREEQYNSTYRVVSVLTVLHQDWLNGKEYKCKVSNKALPAPIEKTISKAKGQPREPQVYTLPPSREEMTKNQVSLTCLVKGFYPSDIAVEWESNGQPENNYKTTPPVLDSDGSFFLYSKLTVDKSRWQQGNVFSCSVMHEALHNHYTQKSLSLSPGK

SEQ ID NO: 20 - protein, 366 aa, artificial sequence
  IL-2-Fc sequence
APTSSSTKKTQLQLEHLLLDLQMILNGINNYKNPELEEMLTAKFYMPKKATELKHLQCLEEELKPLEEVLNLAQSKNFHDLISNINVIVLELKGSETTFMCEYADETATIVEFLNRWITFSQSIISTLTGGGGSGGGGSDKTHTCPPCPAPEAAGGPSVFLFPPKPKDTLMISRTPEVTCVVVDVSHEDPEVKFNWYVDGVEVHNAKTKPREEQYNSTYRVVSVLTVLHQDWLNGKEYKCKVSNKALPAPIEKTISKAKGQPREPQVYTLPPSREEMTKNQVSLTCLVKGFYPSDIAVEWESNGQPENNYKTTPPVLDSDGSFFLYSKLTVDKSRWQQGNVFSCSVMHEALHNHYTQKSLSLSPGK

SEQ ID NO: 21 - protein, 366 aa, artificial sequence
  IL-2-Fc sequence
APTSSSTKKTQLQLEHLLLDLQMILNGINNYKNPELEEMLTAKFYMPKKATELKHLQCLEEELKPLEEVLNLAGDASIHDLISNINVIVLELKGSETTFMCEYADETATIVEFLNRWITFSQSIISTLTGGGGSGGGGSDKTHTCPPCPAPEAAGGPSVFLFPPKPKDTLMISRTPEVTCVVVDVSHEDPEVKFNWYVDGVEVHNAKTKPREEQYNSTYRVVSVLTVLHQDWLNGKEYKCKVSNKALPAPIEKTISKAKGQPREPQVYTLPPSREEMTKNQVSLTCLVKGFYPSDIAVEWESNGQPENNYKTTPPVLDSDGSFFLYSKLTVDKSRWQQGNVFSCSVMHEALHNHYTQKSLSLSPGK

SEQ ID NO: 22 - protein, 366 aa, artificial sequence
  IL-2-Fc sequence
APASSSTKKTQLQLEHLLLDLQMILNGINNYKNPELEEMLTAKFYMPKKATELKHLQCLEEELKPLEEVLNLAGDASIHDLISNINVIVLELKGSETTFMCEYADETATIVEFLNRWITFSQSIISTLTGGGGSGGGGSDKTHTCPPCPAPEAAGGPSVFLFPPKPKDTLMISRTPEVTCVVVDVSHEDPEVKFNWYVDGVEVHNAKTKPREEQYNSTYRVVSVLTVLHQDWLNGKEYKCKVSNKALPAPIEKTISKAKGQPREPQVYTLPPSREEMTKNQVSLTCLVKGFYPSDIAVEWESNGQPENNYKTTPPVLDSDGSFFLYSKLTVDKSRWQQGNVFSCSVMHEALHNHYTQKSLSLSPGK

SEQ ID NO: 23 - protein, 370 aa, artificial sequence
  IL-2-Fc sequence
APTSSSTKKTQLQLEHLLLDLQMILNGINNYKNPKLTDMLTFEFYMPKKATELKHLQCLERELKPLEEVLNLAQSKNFHLRPRDLISNINVIVLELKGSETTFMCEYADETATIVEFLNRWITFSQSIISTLTGGGGSGGGGSDKTHTCPPCPAPEAAGGPSVFLFPPKPKDTLMISRTPEVTCVVVDVSHEDPEVKFNWYVDGVEVHNAKTKPREEQYNSTYRVVSVLTVLHQDWLNGKEYKCKVSNKALPAPIEKTISKAKGQPREPQVYTLPPSREEMTKNQVSLTCLVKGFYPSDIAVEWESNGQPENNYKTTPPVLDSDGSFFLYSKLTVDKSRWQQGNVFSCSVMHEALHNHYTQKSLSLSPGK

SEQ ID NO: 24 - protein, 370 aa, artificial sequence
  IL-2-Fc sequence
APTSSSTKKTQLQLEHLLLDLQMILNGINNYKNPKLTRMLTFKFYMPKKATELKHLQCLEEELKPLEEVLNLAQSKNFHLRPRDLISNINVIVLELKGSETTFMCEYADETATIVEFLNRWITFSQSIISTLTGGGGSGGGGSDKTHTCPPCPAPEAAGGPSVFLFPPKPKDTLMISRTPEVTCVVVDVSHEDPEVKFNWYVDGVEVHNAKTKPREEQYNSTYRVVSVLTVLHQDWLNGKEYKCKVSNKALPAPIEKTISKAKGQPREPQVYTLPPSREEMTKNQVSLTCLVKGFYPSDIAVEWESNGQPENNYKTTPPVLDSDGSFFLYSKLTVDKSRWQQGNVFSCSVMHEALHNHYTQKSLSLSPGK

SEQ ID NO: 25 - protein, 129 aa, artificial sequence
  synthetic sequence
APTSSSTKKTQLQLEHLLLDLQMILNGINNYKNPKLTRMLTFKFYMPKKATELKHLQCLEEELKPLEEVLNLAGDASIHDLISNINVIVLELKGSETTFMCEYADETATIVEFLNRWITFSQSIISTLT

SEQ ID NO: 26 - protein, 129 aa, artificial sequence
  synthetic sequence
APTSSSTKKTQLQLEHLLLDLQMILNGINNYKNPKLTRMLTFKFYMPKKATELKHLQCLEEELKPLEEVLNLAQSKNFHDLISNINVIVLELKGSETTFMCEYADETATIVEFLNRWITFSQSIISTLT

SEQ ID NO: 27 - protein, 133 aa, artificial sequence
  synthetic sequence
APTSSSTKKTQLQLEHLLLDLQMILNGINNYKNPELEEMLTAKFYMPKKATELKHLQCLEEELKPLEEVLNLAQSKNFHLRPRDLISNINVIVLELKGSETTFMCEYADETATIVEFLNRWITFSQSIISTLT

SEQ ID NO: 28 - protein, 133 aa, artificial sequence
  synthetic sequence
APASSSTKKTQLQLEHLLLDLQMILNGINNYKNPELEEMLTAKFYMPKKATELKHLQCLEEELKPLEEVLNLAQSKNFHLRPRDLISNINVIVLELKGSETTFMCEYADETATIVEFLNRWITFSQSIISTLT

SEQ ID NO: 29 - protein, 129 aa, artificial sequence
  synthetic sequence
APASSSTKKTQLQLEHLLLDLQMILNGINNYKNPELEEMLTAKFYMPKKATELKHLQCLEEELKPLEEVLNLAGDASIHDLISNINVIVLELKGSETTFMCEYADETATIVEFLNRWITFSQSIISTLT

SEQ ID NO: 30 - protein, 129 aa, artificial sequence
  synthetic sequence
APASSSTKKTQLQLEHLLLDLQMILNGINNYKNPELEEMLTAKFYMPKKATELKHLQCLEEELKPLEEVLNLAQSKNFHDLISNINVIVLELKGSETTFMCEYADETATIVEFLNRWITFSQSIISTLT

SEQ ID NO: 31 - protein, 133 aa, artificial sequence
  synthetic sequence
APASSSTKKTQLQLEHLLLDLQMILNGINNYKNPELEEMLTFKFYMPKKATELKHLQCLEEELKPLEEVLNLAQSKNFHLRPRDLISNINVIVLELKGSETTFMCEYADETATIVEFLNRWITFSQSIISTLT

SEQ ID NO: 32 - protein, 129 aa, artificial sequence
  synthetic sequence
APASSSTKKTQLQLEHLLLDLQMILNGINNYKNPELEEMLTFKFYMPKKATELKHLQCLEEELKPLEEVLNLAGDASIHDLISNINVIVLELKGSETTFMCEYADETATIVEFLNRWITFSQSIISTLT

SEQ ID NO: 33 - protein, 129 aa, artificial sequence
  synthetic sequence
APASSSTKKTQLQLEHLLLDLQMILNGINNYKNPELEEMLTFKFYMPKKATELKHLQCLEEELKPLEEVLNLAQSKNFHDLISNINVIVLELKGSETTFMCEYADETATIVEFLNRWITFSQSIISTLT

SEQ ID NO: 34 - protein, 129 aa, artificial sequence
  synthetic sequence
APASSSTKKTQLQLEHLLLDLQMILNGINNYKNPKLTRMLTFKFYMPKKATELKHLQCLEEELKPLEEVLNLAGDASIHDLISNINVIVLELKGSETTFMCEYADETATIVEFLNRWITFSQSIISTLT

SEQ ID NO: 35 - protein, 129 aa, artificial sequence
  synthetic sequence
APASSSTKKTQLQLEHLLLDLQMILNGINNYKNPKLTRMLTFKFYMPKKATELKHLQCLEEELKPLEEVLNLAQSKNFHDLISNINVIVLELKGSETTFMCEYADETATIVEFLNRWITFSQSIISTLT

SEQ ID NO: 36 - protein, 133 aa, artificial sequence; identical to SEQ ID NO: 1
  synthetic sequence

SEQ ID NO: 37 - protein, 133 aa, artificial sequence; identical to SEQ ID NO: 27
  synthetic sequence

SEQ ID NO: 38 - protein, 133 aa, artificial sequence
  synthetic sequence
APASSSTKKTQRQLEHLLLDLQMILNGINNYKNPELEEMLTAKFYMPKKATELKHLQCLEEELKPLEEVLNLAQSKNFHLRPRDLISNINVIVLELKGSETTFMCEYADETATIVEFLNRWITFSQSIISTLT

SEQ ID NO: 39 - protein, 133 aa, artificial sequence
  synthetic sequence
APASSSTKKTQKQLEHLLLDLQMILNGINNYKNPELEEMLTAKFYMPKKATELKHLQCLEEELKPLEEVLNLAQSKNFHLRPRDLISNINVIVLELKGSETTFMCEYADETATIVEFLNRWITFSQSIISTLT

SEQ ID NO: 40 - protein, 133 aa, artificial sequence
  synthetic sequence
APASSSTKKTQEQLEHLLLDLQMILNGINNYKNPELEEMLTAKFYMPKKATELKHLQCLEEELKPLEEVLNLAQSKNFHLRPRDLISNINVIVLELKGSETTFMCEYADETATIVEFLNRWITFSQSIISTLT

SEQ ID NO: 41 - protein, 133 aa, artificial sequence
  synthetic sequence
APASSSTKKTQQQLEHLLLDLQMILNGINNYKNPELEEMLTAKFYMPKKATELKHLQCLEEELKPLEEVLNLAQSKNFHLRPRDLISNINVIVLELKGSETTFMCEYADETATIVEFLNRWITFSQSIISTLT

SEQ ID NO: 42 - protein, 133 aa, artificial sequence
  synthetic sequence
APASSSTKKTQLQLQHLLLDLQMILNGINNYKNPELEEMLTAKFYMPKKATELKHLQCLEEELKPLEEVLNLAQSKNFHLRPRDLISNINVIVLELKGSETTFMCEYADETATIVEFLNRWITFSQSIISTLT

SEQ ID NO: 43 - protein, 133 aa, artificial sequence
  synthetic sequence
APASSSTKKTQLQLRHLLLDLQMILNGINNYKNPELEEMLTAKFYMPKKATELKHLQCLEEELKPLEEVLNLAQSKNFHLRPRDLISNINVIVLELKGSETTFMCEYADETATIVEFLNRWITFSQSIISTLT

SEQ ID NO: 44 - protein, 133 aa, artificial sequence
  synthetic sequence
APASSSTKKTQLQLAHLLLDLQMILNGINNYKNPELEEMLTAKFYMPKKATELKHLQCLEEELKPLEEVLNLAQSKNFHLRPRDLISNINVIVLELKGSETTFMCEYADETATIVEFLNRWITFSQSIISTLT

SEQ ID NO: 45 - protein, 133 aa, artificial sequence
  synthetic sequence
APASSSTKKTQLQLSHLLLDLQMILNGINNYKNPELEEMLTAKFYMPKKATELKHLQCLEEELKPLEEVLNLAQSKNFHLRPRDLISNINVIVLELKGSETTFMCEYADETATIVEFLNRWITFSQSIISTLT

SEQ ID NO: 46 - protein, 133 aa, artificial sequence
  synthetic sequence
APASSSTKKTQLQLENLLLDLQMILNGINNYKNPELEEMLTAKFYMPKKATELKHLQCLEEELKPLEEVLNLAQSKNFHLRPRDLISNINVIVLELKGSETTFMCEYADETATIVEFLNRWITFSQSIISTLT

SEQ ID NO: 47 - protein, 133 aa, artificial sequence
  synthetic sequence
APASSSTKKTQLQLETLLLDLQMILNGINNYKNPELEEMLTAKFYMPKKATELKHLQCLEEELKPLEEVLNLAQSKNFHLRPRDLISNINVIVLELKGSETTFMCEYADETATIVEFLNRWITFSQSIISTLT

SEQ ID NO: 48 - protein, 133 aa, artificial sequence
  synthetic sequence
APASSSTKKTQLQLEYLLLDLQMILNGINNYKNPELEEMLTAKFYMPKKATELKHLQCLEEELKPLEEVLNLAQSKNFHLRPRDLISNINVIVLELKGSETTFMCEYADETATIVEFLNRWITFSQSIISTLT

SEQ ID NO: 49 - protein, 133 aa, artificial sequence
  synthetic sequence
APASSSTKKTQLQLEALLLDLQMILNGINNYKNPELEEMLTAKFYMPKKATELKHLQCLEEELKPLEEVLNLAQSKNFHLRPRDLISNINVIVLELKGSETTFMCEYADETATIVEFLNRWITFSQSIISTLT

SEQ ID NO: 50 - protein, 133 aa, artificial sequence
  synthetic sequence
APASSSTKKTQLQLEELLLDLQMILNGINNYKNPELEEMLTAKFYMPKKATELKHLQCLEEELKPLEEVLNLAQSKNFHLRPRDLISNINVIVLELKGSETTFMCEYADETATIVEFLNRWITFSQSIISTLT

SEQ ID NO: 51 - protein, 133 aa, artificial sequence
  synthetic sequence
APASSSTKKTQLQLEDLLLDLQMILNGINNYKNPELEEMLTAKFYMPKKATELKHLQCLEEELKPLEEVLNLAQSKNFHLRPRDLISNINVIVLELKGSETTFMCEYADETATIVEFLNRWITFSQSIISTLT

SEQ ID NO: 52 - protein, 133 aa, artificial sequence
  synthetic sequence
APASSSTKKTQLQLERLLLDLQMILNGINNYKNPELEEMLTAKFYMPKKATELKHLQCLEEELKPLEEVLNLAQSKNFHLRPRDLISNINVIVLELKGSETTFMCEYADETATIVEFLNRWITFSQSIISTLT

SEQ ID NO: 53 - protein, 133 aa, artificial sequence
  synthetic sequence
APASSSTKKTQLQLEHLLDDLQMILNGINNYKNPELEEMLTAKFYMPKKATELKHLQCLEEELKPLEEVLNLAQSKNFHLRPRDLISNINVIVDELKGSETTFMCEYADETATIVEFLNRWITFSQSIISTLT

SEQ ID NO: 54 - protein, 133 aa, artificial sequence
  synthetic sequence
APASSSTKKTQLQLEHLLEDLQMILNGINNYKNPELEEMLTAKFYMPKKATELKHLQCLEEELKPLEEVLNLAQSKNFHLRPRDLISNINVIVEELKGSETTFMCEYADETATIVEFLNRWITFSQSIISTLT

SEQ ID NO: 55 - protein, 133 aa, artificial sequence
  synthetic sequence
APASSSTKKTQLQLEHLLRDLQMILNGINNYKNPELEEMLTAKFYMPKKATELKHLQCLEEELKPLEEVLNLAQSKNFHLRPRDLISNINVIVRELKGSETTFMCEYADETATIVEFLNRWITFSQSIISTLT

SEQ ID NO: 56 - protein, 133 aa, artificial sequence
  synthetic sequence
APASSSTKKTQLQLEHLLSDLQMILNGINNYKNPELEEMLTAKFYMPKKATELKHLQCLEEELKPLEEVLNLAQSKNFHLRPRDLISNINVIVSELKGSETTFMCEYADETATIVEFLNRWITFSQSIISTLT

SEQ ID NO: 57 - protein, 133 aa, artificial sequence
  synthetic sequence
APASSSTKKTQLQLEHLLLNLQMILNGINNYKNPELEEMLTAKFYMPKKATELKHLQCLEEELKPLEEVLNLAQSKNFHLRPRDLISNINVIVLELKGSETTFMCEYADETATIVEFLNRWITFSQSIISTLT

SEQ ID NO: 58 - protein, 133 aa, artificial sequence
  synthetic sequence
APASSSTKKTQLQLEHLLLQLQMILNGINNYKNPELEEMLTAKFYMPKKATELKHLQCLEEELKPLEEVLNLAQSKNFHLRPRDLISNINVIVLELKGSETTFMCEYADETATIVEFLNRWITFSQSIISTLT

SEQ ID NO: 59 - protein, 133 aa, artificial sequence
  synthetic sequence
APASSSTKKTQLQLEHLLLELQMILNGINNYKNPELEEMLTAKFYMPKKATELKHLQCLEEELKPLEEVLNLAQSKNFHLRPRDLISNINVIVLELKGSETTFMCEYADETATIVEFLNRWITFSQSIISTLT

SEQ ID NO: 60 - protein, 133 aa, artificial sequence
  synthetic sequence
APASSSTKKTQLQLEHLLLALQMILNGINNYKNPELEEMLTAKFYMPKKATELKHLQCLEEELKPLEEVLNLAQSKNFHLRPRDLISNINVIVLELKGSETTFMCEYADETATIVEFLNRWITFSQSIISTLT

SEQ ID NO: 61 - protein, 133 aa, artificial sequence
  synthetic sequence
APASSSTKKTQLQLEHLLLRLQMILNGINNYKNPELEEMLTAKFYMPKKATELKHLQCLEEELKPLEEVLNLAQSKNFHLRPRDLISNINVIVLELKGSETTFMCEYADETATIVEFLNRWITFSQSIISTLT

SEQ ID NO: 62 - protein, 133 aa, artificial sequence
  synthetic sequence
APASSSTKKTQLQLEHLLLSLQMILNGINNYKNPELEEMLTAKFYMPKKATELKHLQCLEEELKPLEEVLNLAQSKNFHLRPRDLISNINVIVLELKGSETTFMCEYADETATIVEFLNRWITFSQSIISTLT

SEQ ID NO: 63 - protein, 133 aa, artificial sequence
  synthetic sequence
APASSSTKKTQLQLEHLLLDLQMILNGINNYKNPELEEMLTAKFYMPKKATELKHLQCLEEELKPLEEVLNLAQSKNFHLRPRNLISNINVIVLELKGSETTFMCEYADETATIVEFLNRWITFSQSIISTLT

SEQ ID NO: 64 - protein, 133 aa, artificial sequence
  synthetic sequence
APASSSTKKTQLQLEHLLLDLQMILNGINNYKNPELEEMLTAKFYMPKKATELKHLQCLEEELKPLEEVLNLAQSKNFHLRPRELISNINVIVLELKGSETTFMCEYADETATIVEFLNRWITFSQSIISTLT

SEQ ID NO: 65 - protein, 133 aa, artificial sequence
  synthetic sequence
APASSSTKKTQLQLEHLLLDLQMILNGINNYKNPELEEMLTAKFYMPKKATELKHLQCLEEELKPLEEVLNLAQSKNFHLRPRQLISNINVIVLELKGSETTFMCEYADETATIVEFLNRWITFSQSIISTLT

SEQ ID NO: 66 - protein, 133 aa, artificial sequence
  synthetic sequence
APASSSTKKTQLQLEHLLLDLQMILNGINNYKNPELEEMLTAKFYMPKKATELKHLQCLEEELKPLEEVLNLAQSKNFHLRPRTLISNINVIVLELKGSETTFMCEYADETATIVEFLNRWITFSQSIISTLT

SEQ ID NO: 67 - protein, 133 aa, artificial sequence
  synthetic sequence
APASSSTKKTQLQLEHLLLDLQMILNGINNYKNPELEEMLTAKFYMPKKATELKHLQCLEEELKPLEEVLNLAQSKNFHLRPRSLISNINVIVLELKGSETTFMCEYADETATIVEFLNRWITFSQSIISTLT

SEQ ID NO: 68 - protein, 133 aa, artificial sequence
  synthetic sequence
APASSSTKKTQLQLEHLLLDLQMILNGINNYKNPELEEMLTAKFYMPKKATELKHLQCLEEELKPLEEVLNLAQSKNFHLRPRRLISNINVIVLELKGSETTFMCEYADETATIVEFLNRWITFSQSIISTLT

SEQ ID NO: 69 - protein, 133 aa, artificial sequence
  synthetic sequence
APASSSTKKTQLQLEHLLLDLQMILNGINNYKNPELEEMLTAKFYMPKKATELKHLQCLEEELKPLEEVLNLAQSKNFHLRPRGLISNINVIVLELKGSETTFMCEYADETATIVEFLNRWITFSQSIISTLT

SEQ ID NO: 70 - protein, 133 aa, artificial sequence
  synthetic sequence
APASSSTKKTQLQLEHLLLDLQMILNGINNYKNPELEEMLTAKFYMPKKATELKHLQCLEEELKPLEEVLNLAQSKNFHLRPRMLISNINVIVLELKGSETTFMCEYADETATIVEFLNRWITFSQSIISTLT

SEQ ID NO: 71 - protein, 133 aa, artificial sequence
  synthetic sequence
APASSSTKKTQLQLEHLLLDLQMILNGINNYKNPELEEMLTAKFYMPKKATELKHLQCLEEELKPLEEVLNLAQSKNFHLRPRFLISNINVIVLELKGSETTFMCEYADETATIVEFLNRWITFSQSIISTLT

SEQ ID NO: 72 - protein, 133 aa, artificial sequence
  synthetic sequence
APASSSTKKTQLQLEHLLLDLQMILNGINNYKNPELEEMLTAKFYMPKKATELKHLQCLEEELKPLEEVLNLAQSKNFHLRPRLLISNINVIVLELKGSETTFMCEYADETATIVEFLNRWITFSQSIISTLT

SEQ ID NO: 73 - protein, 133 aa, artificial sequence
  synthetic sequence
APASSSTKKTQLQLEHLLLDLQMILNGINNYKNPELEEMLTAKFYMPKKATELKHLQCLEEELKPLEEVLNLAQSKNFHLRPRKLISNINVIVLELKGSETTFMCEYADETATIVEFLNRWITFSQSIISTLT

SEQ ID NO: 74 - protein, 133 aa, artificial sequence
  synthetic sequence
APASSSTKKTQLQLEHLLLDLQMILNGINNYKNPELEEMLTAKFYMPKKATELKHLQCLEEELKPLEEVLNLAQSKNFHLRPRHLISNINVIVLELKGSETTFMCEYADETATIVEFLNRWITFSQSIISTLT

SEQ ID NO: 75 - protein, 133 aa, artificial sequence
  synthetic sequence
APASSSTKKTQLQLEHLLLDLQMILNGINNYKNPELEEMLTAKFYMPKKATELKHLQCLEEELKPLEEVLNLAQSKNFHLRPRDLITNINVIVLELKGSETTFMCEYADETATIVEFLNRWITFSQSIISTLT

SEQ ID NO: 76 - protein, 133 aa, artificial sequence
  synthetic sequence
APASSSTKKTQLQLEHLLLDLQMILNGINNYKNPELEEMLTAKFYMPKKATELKHLQCLEEELKPLEEVLNLAQSKNFHLRPRDLIRNINVIVLELKGSETTFMCEYADETATIVEFLNRWITFSQSIISTLT

SEQ ID NO: 77 - protein, 133 aa, artificial sequence
  synthetic sequence
APASSSTKKTQLQLEHLLLDLQMILNGINNYKNPELEEMLTAKFYMPKKATELKHLQCLEEELKPLEEVLNLAQSKNFHLRPRDLIKNINVIVLELKGSETTFMCEYADETATIVEFLNRWITFSQSIISTLT

SEQ ID NO: 78 - protein, 133 aa, artificial sequence
  synthetic sequence
APASSSTKKTQLQLEHLLLDLQMILNGINNYKNPELEEMLTAKFYMPKKATELKHLQCLEEELKPLEEVLNLAQSKNFHLRPRDLILNINVIVLELKGSETTFMCEYADETATIVEFLNRWITFSQSIISTLT

SEQ ID NO: 79 - protein, 133 aa, artificial sequence
  synthetic sequence
APASSSTKKTQLQLEHLLLDLQMILNGINNYKNPELEEMLTAKFYMPKKATELKHLQCLEEELKPLEEVLNLAQSKNFHLRPRDLIMNINVIVLELKGSETTFMCEYADETATIVEFLNRWITFSQSIISTLT

SEQ ID NO: 80 - protein, 133 aa, artificial sequence
  synthetic sequence
APASSSTKKTQLQLEHLLLDLQMILNGINNYKNPELEEMLTAKFYMPKKATELKHLQCLEEELKPLEEVLNLAQSKNFHLRPRDLIHNINVIVLELKGSETTFMCEYADETATIVEFLNRWITFSQSIISTLT

SEQ ID NO: 81 - protein, 133 aa, artificial sequence
  synthetic sequence
APASSSTKKTQLQLEHLLLDLQMILNGINNYKNPELEEMLTAKFYMPKKATELKHLQCLEEELKPLEEVLNLAQSKNFHLRPRDLISDINVIVLELKGSETTFMCEYADETATIVEFLNRWITFSQSIISTLT

SEQ ID NO: 82 - protein, 133 aa, artificial sequence
  synthetic sequence
APASSSTKKTQLQLEHLLLDLQMILNGINNYKNPELEEMLTAKFYMPKKATELKHLQCLEEELKPLEEVLNLAQSKNFHLRPRDLISTINVIVLELKGSETTFMCEYADETATIVEFLNRWITFSQSIISTLT

SEQ ID NO: 83 - protein, 133 aa, artificial sequence
  synthetic sequence
APASSSTKKTQLQLEHLLLDLQMILNGINNYKNPELEEMLTAKFYMPKKATELKHLQCLEEELKPLEEVLNLAQSKNFHLRPRDLISQINVIVLELKGSETTFMCEYADETATIVEFLNRWITFSQSIISTLT

SEQ ID NO: 84 - protein, 133 aa, artificial sequence
  synthetic sequence
APASSSTKKTQLQLEHLLLDLQMILNGINNYKNPELEEMLTAKFYMPKKATELKHLQCLEEELKPLEEVLNLAQSKNFHLRPRDLISRINVIVLELKGSETTFMCEYADETATIVEFLNRWITFSQSIISTLT

SEQ ID NO: 85 - protein, 133 aa, artificial sequence
  synthetic sequence
APASSSTKKTQLQLEHLLLDLQMILNGINNYKNPELEEMLTAKFYMPKKATELKHLQCLEEELKPLEEVLNLAQSKNFHLRPRDLISEINVIVLELKGSETTFMCEYADETATIVEFLNRWITFSQSIISTLT

SEQ ID NO: 86 - protein, 133 aa, artificial sequence
  synthetic sequence
APASSSTKKTQLQLEHLLLDLQMILNGINNYKNPELEEMLTAKFYMPKKATELKHLQCLEEELKPLEEVLNLAQSKNFHLRPRDLISKINVIVLELKGSETTFMCEYADETATIVEFLNRWITFSQSIISTLT

SEQ ID NO: 87 - protein, 133 aa, artificial sequence
  synthetic sequence
APASSSTKKTQLQLEHLLLDLQMILNGINNYKNPELEEMLTAKFYMPKKATELKHLQCLEEELKPLEEVLNLAQSKNFHLRPRDLISHINVIVLELKGSETTFMCEYADETATIVEFLNRWITFSQSIISTLT

SEQ ID NO: 88 - protein, 133 aa, artificial sequence
  synthetic sequence
APASSSTKKTQLQLEHLLLDLQMILNGINNYKNPELEEMLTAKFYMPKKATELKHLQCLEEELKPLEEVLNLAQSKNFHLRPRDLISMINVIVLELKGSETTFMCEYADETATIVEFLNRWITFSQSIISTLT

SEQ ID NO: 89 - protein, 133 aa, artificial sequence
  synthetic sequence
APASSSTKKTQLQLEHLLLDLQMILNGINNYKNPELEEMLTAKFYMPKKATELKHLQCLEEELKPLEEVLNLAQSKNFHLRPRDLISSINVIVLELKGSETTFMCEYADETATIVEFLNRWITFSQSIISTLT

SEQ ID NO: 90 - protein, 133 aa, artificial sequence
  synthetic sequence
APASSSTKKTQLQLEHLLLDLQMILNGINNYKNPELEEMLTAKFYMPKKATELKHLQCLEEELKPLEEVLNLAQSKNFHLRPRDLISLINVIVLELKGSETTFMCEYADETATIVEFLNRWITFSQSIISTLT

SEQ ID NO: 91 - protein, 133 aa, artificial sequence
  synthetic sequence
APASSSTKKTQLQLEHLLLDLQMILNGINNYKNPELEEMLTAKFYMPKKATELKHLQCLEEELKPLEEVLNLAQSKNFHLRPRDLISNINIIVLELKGSETTFMCEYADETATIVEFLNRWITFSQSIISTLT

SEQ ID NO: 92 - protein, 133 aa, artificial sequence
  synthetic sequence
APASSSTKKTQLQLEHLLLDLQMILNGINNYKNPELEEMLTAKFYMPKKATELKHLQCLEEELKPLEEVLNLAQSKNFHLRPRDLISNINLIVLELKGSETTFMCEYADETATIVEFLNRWITFSQSIISTLT

SEQ ID NO: 93 - protein, 133 aa, artificial sequence
  synthetic sequence
APASSSTKKTQLQLEHLLLDLQMILNGINNYKNPELEEMLTAKFYMPKKATELKHLQCLEEELKPLEEVLNLAQSKNFHLRPRDLISNINDIVLELKGSETTFMCEYADETATIVEFLNRWITFSQSIISTLT

SEQ ID NO: 94 - protein, 133 aa, artificial sequence
  synthetic sequence
APASSSTKKTQLQLEHLLLDLQMILNGINNYKNPELEEMLTAKFYMPKKATELKHLQCLEEELKPLEEVLNLAQSKNFHLRPRDLISNINEIVLELKGSETTFMCEYADETATIVEFLNRWITFSQSIISTLT

SEQ ID NO: 95 - protein, 133 aa, artificial sequence
  synthetic sequence
APASSSTKKTQLQLEHLLLDLQMILNGINNYKNPELEEMLTAKFYMPKKATELKHLQCLEEELKPLEEVLNLAQSKNFHLRPRDLISNINNIVLELKGSETTFMCEYADETATIVEFLNRWITFSQSIISTLT

SEQ ID NO: 96 - protein, 133 aa, artificial sequence
  synthetic sequence
APASSSTKKTQLQLEHLLLDLQMILNGINNYKNPELEEMLTAKFYMPKKATELKHLQCLEEELKPLEEVLNLAQSKNFHLRPRDLISNINQIVLELKGSETTFMCEYADETATIVEFLNRWITFSQSIISTLT

SEQ ID NO: 97 - protein, 133 aa, artificial sequence
  synthetic sequence
APASSSTKKTQLQLEHLLLDLQMILNGINNYKNPELEEMLTAKFYMPKKATELKHLQCLEEELKPLEEVLNLAQSKNFHLRPRDLISNINSIVLELKGSETTFMCEYADETATIVEFLNRWITFSQSIISTLT

SEQ ID NO: 98 - protein, 133 aa, artificial sequence
  synthetic sequence
APASSSTKKTQLQLEHLLLDLQMILNGINNYKNPELEEMLTAKFYMPKKATELKHLQCLEEELKPLEEVLNLAQSKNFHLRPRDLISNINHIVLELKGSETTFMCEYADETATIVEFLNRWITFSQSIISTLT

SEQ ID NO: 99 - protein, 133 aa, artificial sequence
  synthetic sequence
APASSSTKKTQLQLEHLLLDLQMILNGINNYKNPELEEMLTAKFYMPKKATELKHLQCLEEELKPLEEVLNLAQSKNFHLRPRDLISNINVEVLELKGSETTFMCEYADETATIVEFLNRWITFSQSIISTLT

SEQ ID NO: 100 - protein, 133 aa, artificial sequence
  synthetic sequence
APASSSTKKTQLQLEHLLLDLQMILNGINNYKNPELEEMLTAKFYMPKKATELKHLQCLEEELKPLEEVLNLAQSKNFHLRPRDLISNINVTVLELKGSETTFMCEYADETATIVEFLNRWITFSQSIISTLT

SEQ ID NO: 101 - protein, 133 aa, artificial sequence
  synthetic sequence
APASSSTKKTQLQLEHLLLDLQMILNGINNYKNPELEEMLTAKFYMPKKATELKHLQCLEEELKPLEEVLNLAQSKNFHLRPRDLISNINVKVLELKGSETTFMCEYADETATIVEFLNRWITFSQSIISTLT

SEQ ID NO: 102 - protein, 133 aa, artificial sequence
  synthetic sequence
APASSSTKKTQLQLEHLLLDLQMILNGINNYKNPELEEMLTAKFYMPKKATELKHLQCLEEELKPLEEVLNLAQSKNFHLRPRDLISNINVRVLELKGSETTFMCEYADETATIVEFLNRWITFSQSIISTLT

SEQ ID NO: 103 - protein, 133 aa, artificial sequence
  synthetic sequence
APASSSTKKTQLQLEHLLLDLQMILNGINNYKNPELEEMLTAKFYMPKKATELKHLQCLEEELKPLEEVLNLAQSKNFHLRPRDLISNINVLVLELKGSETTFMCEYADETATIVEFLNRWITFSQSIISTLT

SEQ ID NO: 104 - protein, 133 aa, artificial sequence
  synthetic sequence
APASSSTKKTQLQLEHLLLDLQMILNGINNYKNPELEEMLTAKFYMPKKATELKHLQCLEEELKPLEEVLNLAQSKNFHLRPRDLISNINVIVLQLKGSETTFMCEYADETATIVEFLNRWITFSQSIISTLT

SEQ ID NO: 105 - protein, 133 aa, artificial sequence
  synthetic sequence
APASSSTKKTQLQLEHLLLDLQMILNGINNYKNPELEEMLTAKFYMPKKATELKHLQCLEEELKPLEEVLNLAQSKNFHLRPRDLISNINVIVLGLKGSETTFMCEYADETATIVEFLNRWITFSQSIISTLT

SEQ ID NO: 106 - protein, 133 aa, artificial sequence
  synthetic sequence
APASSSTKKTQLQLEHLLLDLQMILNGINNYKNPELEEMLTAKFYMPKKATELKHLQCLEEELKPLEEVLNLAQSKNFHLRPRDLISNINVIVLDLKGSETTFMCEYADETATIVEFLNRWITFSQSIISTLT

SEQ ID NO: 107 - protein, 133 aa, artificial sequence
  synthetic sequence
APASSSTKKTQLQLEHLLLDLQMILNGINNYKNPELEEMLTAKFYMPKKATELKHLQCLEEELKPLEEVLNLAQSKNFHLRPRDLISNINVIVLNLKGSETTFMCEYADETATIVEFLNRWITFSQSIISTLT

SEQ ID NO: 108 - protein, 133 aa, artificial sequence
  synthetic sequence
APASSSTKKTQLQLEHLLLDLQMILNGINNYKNPELEEMLTAKFYMPKKATELKHLQCLEEELKPLEEVLNLAQSKNFHLRPRDLISNINVIVLELKGSETTFMCEYADETATIVEFLNRWITFSESIISTLT

SEQ ID NO: 109 - protein, 133 aa, artificial sequence
  synthetic sequence
APASSSTKKTQLQLEHLLLDLQMILNGINNYKNPELEEMLTAKFYMPKKATELKHLQCLEEELKPLEEVLNLAQSKNFHLRPRDLISNINVIVLELKGSETTFMCEYADETATIVEFLNRWITFSDSIISTLT

SEQ ID NO: 110 - protein, 133 aa, artificial sequence
  synthetic sequence
APASSSTKKTQLQLEHLLLDLQMILNGINNYKNPELEEMLTAKFYMPKKATELKHLQCLEEELKPLEEVLNLAQSKNFHLRPRDLISNINVIVLELKGSETTFMCEYADETATIVEFLNRWITFSASIISTLT

SEQ ID NO: 111 - protein, 133 aa, artificial sequence
  synthetic sequence
APASSSTKKTQLQLEHLLLDLQMILNGINNYKNPELEEMLTAKFYMPKKATELKHLQCLEEELKPLEEVLNLAQSKNFHLRPRDLISNINVIVLELKGSETTFMCEYADETATIVEFLNRWITFSSSIISTLT

SEQ ID NO: 112 - protein, 133 aa, artificial sequence
  synthetic sequence
APASSSTKKTQLQLEHLLLDLQMILNGINNYKNPELEEMLTAKFYMPKKATELKHLQCLEEELKPLEEVLNLAQSKNFHLRPRNLISNINVIVLQLKGSETTFMCEYADETATIVEFLNRWITFSQSIISTLT

SEQ ID NO: 113 - protein, 133 aa, artificial sequence
  synthetic sequence
APASSSTKKTQLQLEHLLLDLQMILNGINNYKNPELEEMLTAKFYMPKKATELKHLQCLEEELKPLEEVLNLAQSKNFHLRPRELISNINVIVLQLKGSETTFMCEYADETATIVEFLNRWITFSQSIISTLT

SEQ ID NO: 114 - protein, 133 aa, artificial sequence
  synthetic sequence
APASSSTKKTQLQLEHLLLDLQMILNGINNYKNPELEEMLTAKFYMPKKATELKHLQCLEEELKPLEEVLNLAQSKNFHLRPRTLISNINVIVLQLKGSETTFMCEYADETATIVEFLNRWITFSQSIISTLT

SEQ ID NO: 115 - protein, 133 aa, artificial sequence
  synthetic sequence
APASSSTKKTQLQLEHLLLDLQMILNGINNYKNPELEEMLTAKFYMPKKATELKHLQCLEEELKPLEEVLNLAQSKNFHLRPRQLISNINVIVLQLKGSETTFMCEYADETATIVEFLNRWITFSQSIISTLT

SEQ ID NO: 116 - protein, 133 aa, artificial sequence
  synthetic sequence
APASSSTKKTQLQLETLLLDLQMILNGINNYKNPELEEMLTAKFYMPKKATELKHLQCLEEELKPLEEVLNLAQSKNFHLRPRTLISNINVIVLELKGSETTFMCEYADETATIVEFLNRWITFSQSIISTLT

SEQ ID NO: 117 - protein, 133 aa, artificial sequence
  synthetic sequence
APASSSTKKTQLQLEHLLLDLQMILNGINNYKNPELEEMLTAKFYMPKKATELKHLQCLEEELKPLEEVLNLAQSKNFHLRPRNLISNINIIVLELKGSETTFMCEYADETATIVEFLNRWITFSQSIISTLT

SEQ ID NO: 118 - protein, 133 aa, artificial sequence
  synthetic sequence
APASSSTKKTQLQLEHLLLDLQMILNGINNYKNPELEEMLTAKFYMPKKATELKHLQCLEEELKPLEEVLNLAQSKNFHLRPRTLISNINVIVLELKGSETTFMCEYADETATIVEFLNRWITFSESIISTLT

SEQ ID NO: 119 - protein, 133 aa, artificial sequence
  synthetic sequence
APASSSTKKTQLQLEHLLLDLQMILNGINNYKNPELEEMLTAKFYMPKKATELKHLQCLEEELKPLEEVLNLAQSKNFHLRPRNLISNINVIVLELKGSETTFMCEYADETATIVEFLNRWITFSESIISTLT

SEQ ID NO: 120 - protein, 133 aa, artificial sequence
  synthetic sequence
APASSSTKKTQLQLETLLLDLQMILNGINNYKNPELEEMLTAKFYMPKKATELKHLQCLEEELKPLEEVLNLAQSKNFHLRPRQLISNINVIVLELKGSETTFMCEYADETATIVEFLNRWITFSQSIISTLT

SEQ ID NO: 121 - protein, 133 aa, artificial sequence
  synthetic sequence
APASSSTKKTQLQLETLLLDLQMILNGINNYKNPELEEMLTAKFYMPKKATELKHLQCLEEELKPLEEVLNLAQSKNFHLRPRDLISNINIIVLELKGSETTFMCEYADETATIVEFLNRWITFSQSIISTLT

SEQ ID NO: 122 - protein, 129 aa, artificial sequence; identical to SEQ ID NO: 29
  synthetic sequence

SEQ ID NO: 123 - protein, 129 aa, artificial sequence
  synthetic sequence
APASSSTKKTQRQLEHLLLDLQMILNGINNYKNPELEEMLTAKFYMPKKATELKHLQCLEEELKPLEEVLNLAGDASIHDLISNINVIVLELKGSETTFMCEYADETATIVEFLNRWITFSQSIISTLT

SEQ ID NO: 124 - protein, 129 aa, artificial sequence
  synthetic sequence
APASSSTKKTQKQLEHLLLDLQMILNGINNYKNPELEEMLTAKFYMPKKATELKHLQCLEEELKPLEEVLNLAGDASIHDLISNINVIVLELKGSETTFMCEYADETATIVEFLNRWITFSQSIISTLT

SEQ ID NO: 125 - protein, 129 aa, artificial sequence
  synthetic sequence
APASSSTKKTQEQLEHLLLDLQMILNGINNYKNPELEEMLTAKFYMPKKATELKHLQCLEEELKPLEEVLNLAGDASIHDLISNINVIVLELKGSETTFMCEYADETATIVEFLNRWITFSQSIISTLT

SEQ ID NO: 126 - protein, 129 aa, artificial sequence
  synthetic sequence
APASSSTKKTQQQLEHLLLDLQMILNGINNYKNPELEEMLTAKFYMPKKATELKHLQCLEEELKPLEEVLNLAGDASIHDLISNINVIVLELKGSETTFMCEYADETATIVEFLNRWITFSQSIISTLT

SEQ ID NO: 127 - protein, 129 aa, artificial sequence
  synthetic sequence
APASSSTKKTQLQLQHLLLDLQMILNGINNYKNPELEEMLTAKFYMPKKATELKHLQCLEEELKPLEEVLNLAGDASIHDLISNINVIVLELKGSETTFMCEYADETATIVEFLNRWITFSQSIISTLT

SEQ ID NO: 128 - protein, 129 aa, artificial sequence
  synthetic sequence
APASSSTKKTQLQLRHLLLDLQMILNGINNYKNPELEEMLTAKFYMPKKATELKHLQCLEEELKPLEEVLNLAGDASIHDLISNINVIVLELKGSETTFMCEYADETATIVEFLNRWITFSQSIISTLT

SEQ ID NO: 129 - protein, 129 aa, artificial sequence
  synthetic sequence
APASSSTKKTQLQLAHLLLDLQMILNGINNYKNPELEEMLTAKFYMPKKATELKHLQCLEEELKPLEEVLNLAGDASIHDLISNINVIVLELKGSETTFMCEYADETATIVEFLNRWITFSQSIISTLT

SEQ ID NO: 130 - protein, 129 aa, artificial sequence
  synthetic sequence
APASSSTKKTQLQLSHLLLDLQMILNGINNYKNPELEEMLTAKFYMPKKATELKHLQCLEEELKPLEEVLNLAGDASIHDLISNINVIVLELKGSETTFMCEYADETATIVEFLNRWITFSQSIISTLT

SEQ ID NO: 131 - protein, 129 aa, artificial sequence
  synthetic sequence
APASSSTKKTQLQLENLLLDLQMILNGINNYKNPELEEMLTAKFYMPKKATELKHLQCLEEELKPLEEVLNLAGDASIHDLISNINVIVLELKGSETTFMCEYADETATIVEFLNRWITFSQSIISTLT

SEQ ID NO: 132 - protein, 129 aa, artificial sequence
  synthetic sequence
APASSSTKKTQLQLETLLLDLQMILNGINNYKNPELEEMLTAKFYMPKKATELKHLQCLEEELKPLEEVLNLAGDASIHDLISNINVIVLELKGSETTFMCEYADETATIVEFLNRWITFSQSIISTLT

SEQ ID NO: 133 - protein, 129 aa, artificial sequence
  synthetic sequence
APASSSTKKTQLQLEYLLLDLQMILNGINNYKNPELEEMLTAKFYMPKKATELKHLQCLEEELKPLEEVLNLAGDASIHDLISNINVIVLELKGSETTFMCEYADETATIVEFLNRWITFSQSIISTLT

SEQ ID NO: 134 - protein, 129 aa, artificial sequence
  synthetic sequence
APASSSTKKTQLQLEALLLDLQMILNGINNYKNPELEEMLTAKFYMPKKATELKHLQCLEEELKPLEEVLNLAGDASIHDLISNINVIVLELKGSETTFMCEYADETATIVEFLNRWITFSQSIISTLT

SEQ ID NO: 135 - protein, 129 aa, artificial sequence
  synthetic sequence
APASSSTKKTQLQLEELLLDLQMILNGINNYKNPELEEMLTAKFYMPKKATELKHLQCLEEELKPLEEVLNLAGDASIHDLISNINVIVLELKGSETTFMCEYADETATIVEFLNRWITFSQSIISTLT

SEQ ID NO: 136 - protein, 129 aa, artificial sequence
  synthetic sequence
APASSSTKKTQLQLEDLLLDLQMILNGINNYKNPELEEMLTAKFYMPKKATELKHLQCLEEELKPLEEVLNLAGDASIHDLISNINVIVLELKGSETTFMCEYADETATIVEFLNRWITFSQSIISTLT

SEQ ID NO: 137 - protein, 129 aa, artificial sequence
  synthetic sequence
APASSSTKKTQLQLERLLLDLQMILNGINNYKNPELEEMLTAKFYMPKKATELKHLQCLEEELKPLEEVLNLAGDASIHDLISNINVIVLELKGSETTFMCEYADETATIVEFLNRWITFSQSIISTLT

SEQ ID NO: 138 - protein, 129 aa, artificial sequence
  synthetic sequence
APASSSTKKTQLQLEHLLDDLQMILNGINNYKNPELEEMLTAKFYMPKKATELKHLQCLEEELKPLEEVLNLAGDASIHDLISNINVIVDELKGSETTFMCEYADETATIVEFLNRWITFSQSIISTLT

SEQ ID NO: 139 - protein, 129 aa, artificial sequence
  synthetic sequence
APASSSTKKTQLQLEHLLEDLQMILNGINNYKNPELEEMLTAKFYMPKKATELKHLQCLEEELKPLEEVLNLAGDASIHDLISNINVIVEELKGSETTFMCEYADETATIVEFLNRWITFSQSIISTLT

SEQ ID NO: 140 - protein, 129 aa, artificial sequence
  synthetic sequence
APASSSTKKTQLQLEHLLRDLQMILNGINNYKNPELEEMLTAKFYMPKKATELKHLQCLEEELKPLEEVLNLAGDASIHDLISNINVIVRELKGSETTFMCEYADETATIVEFLNRWITFSQSIISTLT

SEQ ID NO: 141 - protein, 129 aa, artificial sequence
  synthetic sequence
APASSSTKKTQLQLEHLLSDLQMILNGINNYKNPELEEMLTAKFYMPKKATELKHLQCLEEELKPLEEVLNLAGDASIHDLISNINVIVSELKGSETTFMCEYADETATIVEFLNRWITFSQSIISTLT

SEQ ID NO: 142 - protein, 129 aa, artificial sequence
  synthetic sequence
APASSSTKKTQLQLEHLLLNLQMILNGINNYKNPELEEMLTAKFYMPKKATELKHLQCLEEELKPLEEVLNLAGDASIHDLISNINVIVLELKGSETTFMCEYADETATIVEFLNRWITFSQSIISTLT

SEQ ID NO: 143 - protein, 129 aa, artificial sequence
  synthetic sequence
APASSSTKKTQLQLEHLLLQLQMILNGINNYKNPELEEMLTAKFYMPKKATELKHLQCLEEELKPLEEVLNLAGDASIHDLISNINVIVLELKGSETTFMCEYADETATIVEFLNRWITFSQSIISTLT

SEQ ID NO: 144 - protein, 129 aa, artificial sequence
  synthetic sequence
APASSSTKKTQLQLEHLLLELQMILNGINNYKNPELEEMLTAKFYMPKKATELKHLQCLEEELKPLEEVLNLAGDASIHDLISNINVIVLELKGSETTFMCEYADETATIVEFLNRWITFSQSIISTLT

SEQ ID NO: 145 - protein, 129 aa, artificial sequence
  synthetic sequence
APASSSTKKTQLQLEHLLLALQMILNGINNYKNPELEEMLTAKFYMPKKATELKHLQCLEEELKPLEEVLNLAGDASIHDLISNINVIVLELKGSETTFMCEYADETATIVEFLNRWITFSQSIISTLT

SEQ ID NO: 146 - protein, 129 aa, artificial sequence
  synthetic sequence
APASSSTKKTQLQLEHLLLRLQMILNGINNYKNPELEEMLTAKFYMPKKATELKHLQCLEEELKPLEEVLNLAGDASIHDLISNINVIVLELKGSETTFMCEYADETATIVEFLNRWITFSQSIISTLT

SEQ ID NO: 147 - protein, 129 aa, artificial sequence
  synthetic sequence
APASSSTKKTQLQLEHLLLSLQMILNGINNYKNPELEEMLTAKFYMPKKATELKHLQCLEEELKPLEEVLNLAGDASIHDLISNINVIVLELKGSETTFMCEYADETATIVEFLNRWITFSQSIISTLT

SEQ ID NO: 148 - protein, 129 aa, artificial sequence
  synthetic sequence
APASSSTKKTQLQLEHLLLDLQMILNGINNYKNPELEEMLTAKFYMPKKATELKHLQCLEEELKPLEEVLNLAGDASIHNLISNINVIVLELKGSETTFMCEYADETATIVEFLNRWITFSQSIISTLT

SEQ ID NO: 149 - protein, 129 aa, artificial sequence
  synthetic sequence
APASSSTKKTQLQLEHLLLDLQMILNGINNYKNPELEEMLTAKFYMPKKATELKHLQCLEEELKPLEEVLNLAGDASIHELISNINVIVLELKGSETTFMCEYADETATIVEFLNRWITFSQSIISTLT

SEQ ID NO: 150 - protein, 129 aa, artificial sequence
  synthetic sequence
APASSSTKKTQLQLEHLLLDLQMILNGINNYKNPELEEMLTAKFYMPKKATELKHLQCLEEELKPLEEVLNLAGDASIHQLISNINVIVLELKGSETTFMCEYADETATIVEFLNRWITFSQSIISTLT

SEQ ID NO: 151 - protein, 129 aa, artificial sequence
  synthetic sequence
APASSSTKKTQLQLEHLLLDLQMILNGINNYKNPELEEMLTAKFYMPKKATELKHLQCLEEELKPLEEVLNLAGDASIHTLISNINVIVLELKGSETTFMCEYADETATIVEFLNRWITFSQSIISTLT

SEQ ID NO: 152 - protein, 129 aa, artificial sequence
  synthetic sequence
APASSSTKKTQLQLEHLLLDLQMILNGINNYKNPELEEMLTAKFYMPKKATELKHLQCLEEELKPLEEVLNLAGDASIHSLISNINVIVLELKGSETTFMCEYADETATIVEFLNRWITFSQSIISTLT

SEQ ID NO: 153 - protein, 129 aa, artificial sequence
  synthetic sequence
APASSSTKKTQLQLEHLLLDLQMILNGINNYKNPELEEMLTAKFYMPKKATELKHLQCLEEELKPLEEVLNLAGDASIHRLISNINVIVLELKGSETTFMCEYADETATIVEFLNRWITFSQSIISTLT

SEQ ID NO: 154 - protein, 129 aa, artificial sequence
  synthetic sequence
APASSSTKKTQLQLEHLLLDLQMILNGINNYKNPELEEMLTAKFYMPKKATELKHLQCLEEELKPLEEVLNLAGDASIHGLISNINVIVLELKGSETTFMCEYADETATIVEFLNRWITFSQSIISTLT

SEQ ID NO: 155 - protein, 129 aa, artificial sequence
  synthetic sequence
APASSSTKKTQLQLEHLLLDLQMILNGINNYKNPELEEMLTAKFYMPKKATELKHLQCLEEELKPLEEVLNLAGDASIHMLISNINVIVLELKGSETTFMCEYADETATIVEFLNRWITFSQSIISTLT

SEQ ID NO: 156 - protein, 129 aa, artificial sequence
  synthetic sequence
APASSSTKKTQLQLEHLLLDLQMILNGINNYKNPELEEMLTAKFYMPKKATELKHLQCLEEELKPLEEVLNLAGDASIHFLISNINVIVLELKGSETTFMCEYADETATIVEFLNRWITFSQSIISTLT

SEQ ID NO: 157 - protein, 129 aa, artificial sequence
  synthetic sequence
APASSSTKKTQLQLEHLLLDLQMILNGINNYKNPELEEMLTAKFYMPKKATELKHLQCLEEELKPLEEVLNLAGDASIHLLISNINVIVLELKGSETTFMCEYADETATIVEFLNRWITFSQSIISTLT

SEQ ID NO: 158 - protein, 129 aa, artificial sequence
  synthetic sequence
APASSSTKKTQLQLEHLLLDLQMILNGINNYKNPELEEMLTAKFYMPKKATELKHLQCLEEELKPLEEVLNLAGDASIHKLISNINVIVLELKGSETTFMCEYADETATIVEFLNRWITFSQSIISTLT

SEQ ID NO: 159 - protein, 129 aa, artificial sequence
  synthetic sequence
APASSSTKKTQLQLEHLLLDLQMILNGINNYKNPELEEMLTAKFYMPKKATELKHLQCLEEELKPLEEVLNLAGDASIHHLISNINVIVLELKGSETTFMCEYADETATIVEFLNRWITFSQSIISTLT

SEQ ID NO: 160 - protein, 129 aa, artificial sequence
  synthetic sequence
APASSSTKKTQLQLEHLLLDLQMILNGINNYKNPELEEMLTAKFYMPKKATELKHLQCLEEELKPLEEVLNLAGDASIHDLITNINVIVLELKGSETTFMCEYADETATIVEFLNRWITFSQSIISTLT

SEQ ID NO: 161 - protein, 129 aa, artificial sequence
  synthetic sequence
APASSSTKKTQLQLEHLLLDLQMILNGINNYKNPELEEMLTAKFYMPKKATELKHLQCLEEELKPLEEVLNLAGDASIHDLIRNINVIVLELKGSETTFMCEYADETATIVEFLNRWITFSQSIISTLT

SEQ ID NO: 162 - protein, 129 aa, artificial sequence
  synthetic sequence
APASSSTKKTQLQLEHLLLDLQMILNGINNYKNPELEEMLTAKFYMPKKATELKHLQCLEEELKPLEEVLNLAGDASIHDLIKNINVIVLELKGSETTFMCEYADETATIVEFLNRWITFSQSIISTLT

SEQ ID NO: 163 - protein, 129 aa, artificial sequence
  synthetic sequence
APASSSTKKTQLQLEHLLLDLQMILNGINNYKNPELEEMLTAKFYMPKKATELKHLQCLEEELKPLEEVLNLAGDASIHDLILNINVIVLELKGSETTFMCEYADETATIVEFLNRWITFSQSIISTLT

SEQ ID NO: 164 - protein, 129 aa, artificial sequence
  synthetic sequence
APASSSTKKTQLQLEHLLLDLQMILNGINNYKNPELEEMLTAKFYMPKKATELKHLQCLEEELKPLEEVLNLAGDASIHDLIMNINVIVLELKGSETTFMCEYADETATIVEFLNRWITFSQSIISTLT

SEQ ID NO: 165 - protein, 129 aa, artificial sequence
  synthetic sequence
APASSSTKKTQLQLEHLLLDLQMILNGINNYKNPELEEMLTAKFYMPKKATELKHLQCLEEELKPLEEVLNLAGDASIHDLIHNINVIVLELKGSETTFMCEYADETATIVEFLNRWITFSQSIISTLT

SEQ ID NO: 166 - protein, 129 aa, artificial sequence
  synthetic sequence
APASSSTKKTQLQLEHLLLDLQMILNGINNYKNPELEEMLTAKFYMPKKATELKHLQCLEEELKPLEEVLNLAGDASIHDLISDINVIVLELKGSETTFMCEYADETATIVEFLNRWITFSQSIISTLT

SEQ ID NO: 167 - protein, 129 aa, artificial sequence
  synthetic sequence
APASSSTKKTQLQLEHLLLDLQMILNGINNYKNPELEEMLTAKFYMPKKATELKHLQCLEEELKPLEEVLNLAGDASIHDLISTINVIVLELKGSETTFMCEYADETATIVEFLNRWITFSQSIISTLT

SEQ ID NO: 168 - protein, 129 aa, artificial sequence
  synthetic sequence
APASSSTKKTQLQLEHLLLDLQMILNGINNYKNPELEEMLTAKFYMPKKATELKHLQCLEEELKPLEEVLNLAGDASIHDLISQINVIVLELKGSETTFMCEYADETATIVEFLNRWITFSQSIISTLT

SEQ ID NO: 169 - protein, 129 aa, artificial sequence
  synthetic sequence
APASSSTKKTQLQLEHLLLDLQMILNGINNYKNPELEEMLTAKFYMPKKATELKHLQCLEEELKPLEEVLNLAGDASIHDLISRINVIVLELKGSETTFMCEYADETATIVEFLNRWITFSQSIISTLT

SEQ ID NO: 170 - protein, 129 aa, artificial sequence
  synthetic sequence
APASSSTKKTQLQLEHLLLDLQMILNGINNYKNPELEEMLTAKFYMPKKATELKHLQCLEEELKPLEEVLNLAGDASIHDLISEINVIVLELKGSETTFMCEYADETATIVEFLNRWITFSQSIISTLT

SEQ ID NO: 171 - protein, 129 aa, artificial sequence
  synthetic sequence
APASSSTKKTQLQLEHLLLDLQMILNGINNYKNPELEEMLTAKFYMPKKATELKHLQCLEEELKPLEEVLNLAGDASIHDLISKINVIVLELKGSETTFMCEYADETATIVEFLNRWITFSQSIISTLT

SEQ ID NO: 172 - protein, 129 aa, artificial sequence
  synthetic sequence
APASSSTKKTQLQLEHLLLDLQMILNGINNYKNPELEEMLTAKFYMPKKATELKHLQCLEEELKPLEEVLNLAGDASIHDLISHINVIVLELKGSETTFMCEYADETATIVEFLNRWITFSQSIISTLT

SEQ ID NO: 173 - protein, 129 aa, artificial sequence
  synthetic sequence
APASSSTKKTQLQLEHLLLDLQMILNGINNYKNPELEEMLTAKFYMPKKATELKHLQCLEEELKPLEEVLNLAGDASIHDLISMINVIVLELKGSETTFMCEYADETATIVEFLNRWITFSQSIISTLT

SEQ ID NO: 174 - protein, 129 aa, artificial sequence
  synthetic sequence
APASSSTKKTQLQLEHLLLDLQMILNGINNYKNPELEEMLTAKFYMPKKATELKHLQCLEEELKPLEEVLNLAGDASIHDLISSINVIVLELKGSETTFMCEYADETATIVEFLNRWITFSQSIISTLT

SEQ ID NO: 175 - protein, 129 aa, artificial sequence
  synthetic sequence
APASSSTKKTQLQLEHLLLDLQMILNGINNYKNPELEEMLTAKFYMPKKATELKHLQCLEEELKPLEEVLNLAGDASIHDLISLINVIVLELKGSETTFMCEYADETATIVEFLNRWITFSQSIISTLT

SEQ ID NO: 176 - protein, 129 aa, artificial sequence
  synthetic sequence
APASSSTKKTQLQLEHLLLDLQMILNGINNYKNPELEEMLTAKFYMPKKATELKHLQCLEEELKPLEEVLNLAGDASIHDLISNINIIVLELKGSETTFMCEYADETATIVEFLNRWITFSQSIISTLT

SEQ ID NO: 177 - protein, 129 aa, artificial sequence
  synthetic sequence
APASSSTKKTQLQLEHLLLDLQMILNGINNYKNPELEEMLTAKFYMPKKATELKHLQCLEEELKPLEEVLNLAGDASIHDLISNINLIVLELKGSETTFMCEYADETATIVEFLNRWITFSQSIISTLT

SEQ ID NO: 178 - protein, 129 aa, artificial sequence
  synthetic sequence
APASSSTKKTQLQLEHLLLDLQMILNGINNYKNPELEEMLTAKFYMPKKATELKHLQCLEEELKPLEEVLNLAGDASIHDLISNINDIVLELKGSETTFMCEYADETATIVEFLNRWITFSQSIISTLT

SEQ ID NO: 179 - protein, 129 aa, artificial sequence
  synthetic sequence
APASSSTKKTQLQLEHLLLDLQMILNGINNYKNPELEEMLTAKFYMPKKATELKHLQCLEEELKPLEEVLNLAGDASIHDLISNINEIVLELKGSETTFMCEYADETATIVEFLNRWITFSQSIISTLT

SEQ ID NO: 180 - protein, 129 aa, artificial sequence
  synthetic sequence
APASSSTKKTQLQLEHLLLDLQMILNGINNYKNPELEEMLTAKFYMPKKATELKHLQCLEEELKPLEEVLNLAGDASIHDLISNINNIVLELKGSETTFMCEYADETATIVEFLNRWITFSQSIISTLT

SEQ ID NO: 181 - protein, 129 aa, artificial sequence
  synthetic sequence
APASSSTKKTQLQLEHLLLDLQMILNGINNYKNPELEEMLTAKFYMPKKATELKHLQCLEEELKPLEEVLNLAGDASIHDLISNINQIVLELKGSETTFMCEYADETATIVEFLNRWITFSQSIISTLT

SEQ ID NO: 182 - protein, 129 aa, artificial sequence
  synthetic sequence
APASSSTKKTQLQLEHLLLDLQMILNGINNYKNPELEEMLTAKFYMPKKATELKHLQCLEEELKPLEEVLNLAGDASIHDLISNINSIVLELKGSETTFMCEYADETATIVEFLNRWITFSQSIISTLT

SEQ ID NO: 183 - protein, 129 aa, artificial sequence
  synthetic sequence
APASSSTKKTQLQLEHLLLDLQMILNGINNYKNPELEEMLTAKFYMPKKATELKHLQCLEEELKPLEEVLNLAGDASIHDLISNINHIVLELKGSETTFMCEYADETATIVEFLNRWITFSQSIISTLT

SEQ ID NO: 184 - protein, 129 aa, artificial sequence
  synthetic sequence
APASSSTKKTQLQLEHLLLDLQMILNGINNYKNPELEEMLTAKFYMPKKATELKHLQCLEEELKPLEEVLNLAGDASIHDLISNINVEVLELKGSETTFMCEYADETATIVEFLNRWITFSQSIISTLT

SEQ ID NO: 185 - protein, 129 aa, artificial sequence
  synthetic sequence
APASSSTKKTQLQLEHLLLDLQMILNGINNYKNPELEEMLTAKFYMPKKATELKHLQCLEEELKPLEEVLNLAGDASIHDLISNINVTVLELKGSETTFMCEYADETATIVEFLNRWITFSQSIISTLT

SEQ ID NO: 186 - protein, 129 aa, artificial sequence
  synthetic sequence
APASSSTKKTQLQLEHLLLDLQMILNGINNYKNPELEEMLTAKFYMPKKATELKHLQCLEEELKPLEEVLNLAGDASIHDLISNINVKVLELKGSETTFMCEYADETATIVEFLNRWITFSQSIISTLT

SEQ ID NO: 187 - protein, 129 aa, artificial sequence
  synthetic sequence
APASSSTKKTQLQLEHLLLDLQMILNGINNYKNPELEEMLTAKFYMPKKATELKHLQCLEEELKPLEEVLNLAGDASIHDLISNINVRVLELKGSETTFMCEYADETATIVEFLNRWITFSQSIISTLT

SEQ ID NO: 188 - protein, 129 aa, artificial sequence
  synthetic sequence
APASSSTKKTQLQLEHLLLDLQMILNGINNYKNPELEEMLTAKFYMPKKATELKHLQCLEEELKPLEEVLNLAGDASIHDLISNINVLVLELKGSETTFMCEYADETATIVEFLNRWITFSQSIISTLT

SEQ ID NO: 189 - protein, 129 aa, artificial sequence
  synthetic sequence
APASSSTKKTQLQLEHLLLDLQMILNGINNYKNPELEEMLTAKFYMPKKATELKHLQCLEEELKPLEEVLNLAGDASIHDLISNINVIVLQLKGSETTFMCEYADETATIVEFLNRWITFSQSIISTLT

SEQ ID NO: 190 - protein, 129 aa, artificial sequence
  synthetic sequence
APASSSTKKTQLQLEHLLLDLQMILNGINNYKNPELEEMLTAKFYMPKKATELKHLQCLEEELKPLEEVLNLAGDASIHDLISNINVIVLGLKGSETTFMCEYADETATIVEFLNRWITFSQSIISTLT

SEQ ID NO: 191 - protein, 129 aa, artificial sequence
  synthetic sequence
APASSSTKKTQLQLEHLLLDLQMILNGINNYKNPELEEMLTAKFYMPKKATELKHLQCLEEELKPLEEVLNLAGDASIHDLISNINVIVLDLKGSETTFMCEYADETATIVEFLNRWITFSQSIISTLT

SEQ ID NO: 192 - protein, 129 aa, artificial sequence
  synthetic sequence
APASSSTKKTQLQLEHLLLDLQMILNGINNYKNPELEEMLTAKFYMPKKATELKHLQCLEEELKPLEEVLNLAGDASIHDLISNINVIVLNLKGSETTFMCEYADETATIVEFLNRWITFSQSIISTLT

SEQ ID NO: 193 - protein, 129 aa, artificial sequence
  synthetic sequence
APASSSTKKTQLQLEHLLLDLQMILNGINNYKNPELEEMLTAKFYMPKKATELKHLQCLEEELKPLEEVLNLAGDASIHDLISNINVIVLELKGSETTFMCEYADETATIVEFLNRWITFSESIISTLT

SEQ ID NO: 194 - protein, 129 aa, artificial sequence
  synthetic sequence
APASSSTKKTQLQLEHLLLDLQMILNGINNYKNPELEEMLTAKFYMPKKATELKHLQCLEEELKPLEEVLNLAGDASIHDLISNINVIVLELKGSETTFMCEYADETATIVEFLNRWITFSDSIISTLT

SEQ ID NO: 195 - protein, 129 aa, artificial sequence
  synthetic sequence
APASSSTKKTQLQLEHLLLDLQMILNGINNYKNPELEEMLTAKFYMPKKATELKHLQCLEEELKPLEEVLNLAGDASIHDLISNINVIVLELKGSETTFMCEYADETATIVEFLNRWITFSASIISTLT

SEQ ID NO: 196 - protein, 129 aa, artificial sequence
  synthetic sequence
APASSSTKKTQLQLEHLLLDLQMILNGINNYKNPELEEMLTAKFYMPKKATELKHLQCLEEELKPLEEVLNLAGDASIHDLISNINVIVLELKGSETTFMCEYADETATIVEFLNRWITFSSSIISTLT

SEQ ID NO: 197 - protein, 129 aa, artificial sequence
  synthetic sequence
APASSSTKKTQLQLEHLLLDLQMILNGINNYKNPELEEMLTAKFYMPKKATELKHLQCLEEELKPLEEVLNLAGDASIHNLISNINVIVLQLKGSETTFMCEYADETATIVEFLNRWITFSQSIISTLT

SEQ ID NO: 198 - protein, 129 aa, artificial sequence
  synthetic sequence
APASSSTKKTQLQLEHLLLDLQMILNGINNYKNPELEEMLTAKFYMPKKATELKHLQCLEEELKPLEEVLNLAGDASIHELISNINVIVLQLKGSETTFMCEYADETATIVEFLNRWITFSQSIISTLT

SEQ ID NO: 199 - protein, 129 aa, artificial sequence
  synthetic sequence
APASSSTKKTQLQLEHLLLDLQMILNGINNYKNPELEEMLTAKFYMPKKATELKHLQCLEEELKPLEEVLNLAGDASIHTLISNINVIVLQLKGSETTFMCEYADETATIVEFLNRWITFSQSIISTLT

SEQ ID NO: 200 - protein, 129 aa, artificial sequence
  synthetic sequence
APASSSTKKTQLQLEHLLLDLQMILNGINNYKNPELEEMLTAKFYMPKKATELKHLQCLEEELKPLEEVLNLAGDASIHQLISNINVIVLQLKGSETTFMCEYADETATIVEFLNRWITFSQSIISTLT

SEQ ID NO: 201 - protein, 129 aa, artificial sequence
  synthetic sequence
APASSSTKKTQLQLETLLLDLQMILNGINNYKNPELEEMLTAKFYMPKKATELKHLQCLEEELKPLEEVLNLAGDASIHTLISNINVIVLELKGSETTFMCEYADETATIVEFLNRWITFSQSIISTLT

SEQ ID NO: 202 - protein, 129 aa, artificial sequence
  synthetic sequence
APASSSTKKTQLQLEHLLLDLQMILNGINNYKNPELEEMLTAKFYMPKKATELKHLQCLEEELKPLEEVLNLAGDASIHNLISNINIIVLELKGSETTFMCEYADETATIVEFLNRWITFSQSIISTLT

SEQ ID NO: 203 - protein, 129 aa, artificial sequence
  synthetic sequence
APASSSTKKTQLQLEHLLLDLQMILNGINNYKNPELEEMLTAKFYMPKKATELKHLQCLEEELKPLEEVLNLAGDASIHTLISNINVIVLELKGSETTFMCEYADETATIVEFLNRWITFSESIISTLT

SEQ ID NO: 204 - protein, 129 aa, artificial sequence
  synthetic sequence
APASSSTKKTQLQLEHLLLDLQMILNGINNYKNPELEEMLTAKFYMPKKATELKHLQCLEEELKPLEEVLNLAGDASIHNLISNINVIVLELKGSETTFMCEYADETATIVEFLNRWITFSESIISTLT

SEQ ID NO: 205 - protein, 129 aa, artificial sequence
  synthetic sequence
APASSSTKKTQLQLETLLLDLQMILNGINNYKNPELEEMLTAKFYMPKKATELKHLQCLEEELKPLEEVLNLAGDASIHQLISNINVIVLELKGSETTFMCEYADETATIVEFLNRWITFSQSIISTLT

SEQ ID NO: 206 - protein, 129 aa, artificial sequence
  synthetic sequence
APASSSTKKTQLQLETLLLDLQMILNGINNYKNPELEEMLTAKFYMPKKATELKHLQCLEEELKPLEEVLNLAGDASIHDLISNINIIVLELKGSETTFMCEYADETATIVEFLNRWITFSQSIISTLT

SEQ ID NO: 207 - protein, 129 aa, artificial sequence; identical to SEQ ID NO: 30
  synthetic sequence

SEQ ID NO: 208 - protein, 129 aa, artificial sequence
  synthetic sequence
APASSSTKKTQRQLEHLLLDLQMILNGINNYKNPELEEMLTAKFYMPKKATELKHLQCLEEELKPLEEVLNLAQSKNFHDLISNINVIVLELKGSETTFMCEYADETATIVEFLNRWITFSQSIISTLT

SEQ ID NO: 209 - protein, 129 aa, artificial sequence
  synthetic sequence
APASSSTKKTQKQLEHLLLDLQMILNGINNYKNPELEEMLTAKFYMPKKATELKHLQCLEEELKPLEEVLNLAQSKNFHDLISNINVIVLELKGSETTFMCEYADETATIVEFLNRWITFSQSIISTLT

SEQ ID NO: 210 - protein, 129 aa, artificial sequence
  synthetic sequence
APASSSTKKTQEQLEHLLLDLQMILNGINNYKNPELEEMLTAKFYMPKKATELKHLQCLEEELKPLEEVLNLAQSKNFHDLISNINVIVLELKGSETTFMCEYADETATIVEFLNRWITFSQSIISTLT

SEQ ID NO: 211 - protein, 129 aa, artificial sequence
  synthetic sequence
APASSSTKKTQQQLEHLLLDLQMILNGINNYKNPELEEMLTAKFYMPKKATELKHLQCLEEELKPLEEVLNLAQSKNFHDLISNINVIVLELKGSETTFMCEYADETATIVEFLNRWITFSQSIISTLT

SEQ ID NO: 212 - protein, 129 aa, artificial sequence
  synthetic sequence
APASSSTKKTQLQLQHLLLDLQMILNGINNYKNPELEEMLTAKFYMPKKATELKHLQCLEEELKPLEEVLNLAQSKNFHDLISNINVIVLELKGSETTFMCEYADETATIVEFLNRWITFSQSIISTLT

SEQ ID NO: 213 - protein, 129 aa, artificial sequence
  synthetic sequence
APASSSTKKTQLQLRHLLLDLQMILNGINNYKNPELEEMLTAKFYMPKKATELKHLQCLEEELKPLEEVLNLAQSKNFHDLISNINVIVLELKGSETTFMCEYADETATIVEFLNRWITFSQSIISTLT

SEQ ID NO: 214 - protein, 129 aa, artificial sequence
  synthetic sequence
APASSSTKKTQLQLAHLLLDLQMILNGINNYKNPELEEMLTAKFYMPKKATELKHLQCLEEELKPLEEVLNLAQSKNFHDLISNINVIVLELKGSETTFMCEYADETATIVEFLNRWITFSQSIISTLT

SEQ ID NO: 215 - protein, 129 aa, artificial sequence
  synthetic sequence
APASSSTKKTQLQLSHLLLDLQMILNGINNYKNPELEEMLTAKFYMPKKATELKHLQCLEEELKPLEEVLNLAQSKNFHDLISNINVIVLELKGSETTFMCEYADETATIVEFLNRWITFSQSIISTLT

SEQ ID NO: 216 - protein, 129 aa, artificial sequence
  synthetic sequence
APASSSTKKTQLQLENLLLDLQMILNGINNYKNPELEEMLTAKFYMPKKATELKHLQCLEEELKPLEEVLNLAQSKNFHDLISNINVIVLELKGSETTFMCEYADETATIVEFLNRWITFSQSIISTLT

SEQ ID NO: 217 - protein, 129 aa, artificial sequence
  synthetic sequence
APASSSTKKTQLQLETLLLDLQMILNGINNYKNPELEEMLTAKFYMPKKATELKHLQCLEEELKPLEEVLNLAQSKNFHDLISNINVIVLELKGSETTFMCEYADETATIVEFLNRWITFSQSIISTLT

SEQ ID NO: 218 - protein, 129 aa, artificial sequence
  synthetic sequence
APASSSTKKTQLQLEYLLLDLQMILNGINNYKNPELEEMLTAKFYMPKKATELKHLQCLEEELKPLEEVLNLAQSKNFHDLISNINVIVLELKGSETTFMCEYADETATIVEFLNRWITFSQSIISTLT

SEQ ID NO: 219 - protein, 129 aa, artificial sequence
  synthetic sequence
APASSSTKKTQLQLEALLLDLQMILNGINNYKNPELEEMLTAKFYMPKKATELKHLQCLEEELKPLEEVLNLAQSKNFHDLISNINVIVLELKGSETTFMCEYADETATIVEFLNRWITFSQSIISTLT

SEQ ID NO: 220 - protein, 129 aa, artificial sequence
  synthetic sequence
APASSSTKKTQLQLEELLLDLQMILNGINNYKNPELEEMLTAKFYMPKKATELKHLQCLEEELKPLEEVLNLAQSKNFHDLISNINVIVLELKGSETTFMCEYADETATIVEFLNRWITFSQSIISTLT

SEQ ID NO: 221 - protein, 129 aa, artificial sequence
  synthetic sequence
APASSSTKKTQLQLEDLLLDLQMILNGINNYKNPELEEMLTAKFYMPKKATELKHLQCLEEELKPLEEVLNLAQSKNFHDLISNINVIVLELKGSETTFMCEYADETATIVEFLNRWITFSQSIISTLT

SEQ ID NO: 222 - protein, 129 aa, artificial sequence
  synthetic sequence
APASSSTKKTQLQLERLLLDLQMILNGINNYKNPELEEMLTAKFYMPKKATELKHLQCLEEELKPLEEVLNLAQSKNFHDLISNINVIVLELKGSETTFMCEYADETATIVEFLNRWITFSQSIISTLT

SEQ ID NO: 223 - protein, 129 aa, artificial sequence
  synthetic sequence
APASSSTKKTQLQLEHLLDDLQMILNGINNYKNPELEEMLTAKFYMPKKATELKHLQCLEEELKPLEEVLNLAQSKNFHDLISNINVIVDELKGSETTFMCEYADETATIVEFLNRWITFSQSIISTLT

SEQ ID NO: 224 - protein, 129 aa, artificial sequence
  synthetic sequence
APASSSTKKTQLQLEHLLEDLQMILNGINNYKNPELEEMLTAKFYMPKKATELKHLQCLEEELKPLEEVLNLAQSKNFHDLISNINVIVEELKGSETTFMCEYADETATIVEFLNRWITFSQSIISTLT

SEQ ID NO: 225 - protein, 129 aa, artificial sequence
  synthetic sequence
APASSSTKKTQLQLEHLLRDLQMILNGINNYKNPELEEMLTAKFYMPKKATELKHLQCLEEELKPLEEVLNLAQSKNFHDLISNINVIVRELKGSETTFMCEYADETATIVEFLNRWITFSQSIISTLT

SEQ ID NO: 226 - protein, 129 aa, artificial sequence
  synthetic sequence
APASSSTKKTQLQLEHLLSDLQMILNGINNYKNPELEEMLTAKFYMPKKATELKHLQCLEEELKPLEEVLNLAQSKNFHDLISNINVIVSELKGSETTFMCEYADETATIVEFLNRWITFSQSIISTLT

SEQ ID NO: 227 - protein, 129 aa, artificial sequence
  synthetic sequence
APASSSTKKTQLQLEHLLLNLQMILNGINNYKNPELEEMLTAKFYMPKKATELKHLQCLEEELKPLEEVLNLAQSKNFHDLISNINVIVLELKGSETTFMCEYADETATIVEFLNRWITFSQSIISTLT

SEQ ID NO: 228 - protein, 129 aa, artificial sequence
  synthetic sequence
APASSSTKKTQLQLEHLLLQLQMILNGINNYKNPELEEMLTAKFYMPKKATELKHLQCLEEELKPLEEVLNLAQSKNFHDLISNINVIVLELKGSETTFMCEYADETATIVEFLNRWITFSQSIISTLT

SEQ ID NO: 229 - protein, 129 aa, artificial sequence
  synthetic sequence
APASSSTKKTQLQLEHLLLELQMILNGINNYKNPELEEMLTAKFYMPKKATELKHLQCLEEELKPLEEVLNLAQSKNFHDLISNINVIVLELKGSETTFMCEYADETATIVEFLNRWITFSQSIISTLT

SEQ ID NO: 230 - protein, 129 aa, artificial sequence
  synthetic sequence
APASSSTKKTQLQLEHLLLALQMILNGINNYKNPELEEMLTAKFYMPKKATELKHLQCLEEELKPLEEVLNLAQSKNFHDLISNINVIVLELKGSETTFMCEYADETATIVEFLNRWITFSQSIISTLT

SEQ ID NO: 231 - protein, 129 aa, artificial sequence
  synthetic sequence
APASSSTKKTQLQLEHLLLRLQMILNGINNYKNPELEEMLTAKFYMPKKATELKHLQCLEEELKPLEEVLNLAQSKNFHDLISNINVIVLELKGSETTFMCEYADETATIVEFLNRWITFSQSIISTLT

SEQ ID NO: 232 - protein, 129 aa, artificial sequence
  synthetic sequence
APASSSTKKTQLQLEHLLLSLQMILNGINNYKNPELEEMLTAKFYMPKKATELKHLQCLEEELKPLEEVLNLAQSKNFHDLISNINVIVLELKGSETTFMCEYADETATIVEFLNRWITFSQSIISTLT

SEQ ID NO: 233 - protein, 129 aa, artificial sequence
  synthetic sequence
APASSSTKKTQLQLEHLLLDLQMILNGINNYKNPELEEMLTAKFYMPKKATELKHLQCLEEELKPLEEVLNLAQSKNFHNLISNINVIVLELKGSETTFMCEYADETATIVEFLNRWITFSQSIISTLT

SEQ ID NO: 234 - protein, 129 aa, artificial sequence
  synthetic sequence
APASSSTKKTQLQLEHLLLDLQMILNGINNYKNPELEEMLTAKFYMPKKATELKHLQCLEEELKPLEEVLNLAQSKNFHELISNINVIVLELKGSETTFMCEYADETATIVEFLNRWITFSQSIISTLT

SEQ ID NO: 235 - protein, 129 aa, artificial sequence
  synthetic sequence
APASSSTKKTQLQLEHLLLDLQMILNGINNYKNPELEEMLTAKFYMPKKATELKHLQCLEEELKPLEEVLNLAQSKNFHQLISNINVIVLELKGSETTFMCEYADETATIVEFLNRWITFSQSIISTLT

SEQ ID NO: 236 - protein, 129 aa, artificial sequence
  synthetic sequence
APASSSTKKTQLQLEHLLLDLQMILNGINNYKNPELEEMLTAKFYMPKKATELKHLQCLEEELKPLEEVLNLAQSKNFHTLISNINVIVLELKGSETTFMCEYADETATIVEFLNRWITFSQSIISTLT

SEQ ID NO: 237 - protein, 129 aa, artificial sequence
  synthetic sequence
APASSSTKKTQLQLEHLLLDLQMILNGINNYKNPELEEMLTAKFYMPKKATELKHLQCLEEELKPLEEVLNLAQSKNFHSLISNINVIVLELKGSETTFMCEYADETATIVEFLNRWITFSQSIISTLT

SEQ ID NO: 238 - protein, 129 aa, artificial sequence
  synthetic sequence
APASSSTKKTQLQLEHLLLDLQMILNGINNYKNPELEEMLTAKFYMPKKATELKHLQCLEEELKPLEEVLNLAQSKNFHRLISNINVIVLELKGSETTFMCEYADETATIVEFLNRWITFSQSIISTLT

SEQ ID NO: 239 - protein, 129 aa, artificial sequence
  synthetic sequence
APASSSTKKTQLQLEHLLLDLQMILNGINNYKNPELEEMLTAKFYMPKKATELKHLQCLEEELKPLEEVLNLAQSKNFHGLISNINVIVLELKGSETTFMCEYADETATIVEFLNRWITFSQSIISTLT

SEQ ID NO: 240 - protein, 129 aa, artificial sequence
  synthetic sequence
APASSSTKKTQLQLEHLLLDLQMILNGINNYKNPELEEMLTAKFYMPKKATELKHLQCLEEELKPLEEVLNLAQSKNFHMLISNINVIVLELKGSETTFMCEYADETATIVEFLNRWITFSQSIISTLT

SEQ ID NO: 241 - protein, 129 aa, artificial sequence
  synthetic sequence
APASSSTKKTQLQLEHLLLDLQMILNGINNYKNPELEEMLTAKFYMPKKATELKHLQCLEEELKPLEEVLNLAQSKNFHFLISNINVIVLELKGSETTFMCEYADETATIVEFLNRWITFSQSIISTLT

SEQ ID NO: 242 - protein, 129 aa, artificial sequence
  synthetic sequence
APASSSTKKTQLQLEHLLLDLQMILNGINNYKNPELEEMLTAKFYMPKKATELKHLQCLEEELKPLEEVLNLAQSKNFHLLISNINVIVLELKGSETTFMCEYADETATIVEFLNRWITFSQSIISTLT

SEQ ID NO: 243 - protein, 129 aa, artificial sequence
  synthetic sequence
APASSSTKKTQLQLEHLLLDLQMILNGINNYKNPELEEMLTAKFYMPKKATELKHLQCLEEELKPLEEVLNLAQSKNFHKLISNINVIVLELKGSETTFMCEYADETATIVEFLNRWITFSQSIISTLT

SEQ ID NO: 244 - protein, 129 aa, artificial sequence
  synthetic sequence
APASSSTKKTQLQLEHLLLDLQMILNGINNYKNPELEEMLTAKFYMPKKATELKHLQCLEEELKPLEEVLNLAQSKNFHHLISNINVIVLELKGSETTFMCEYADETATIVEFLNRWITFSQSIISTLT

SEQ ID NO: 245 - protein, 129 aa, artificial sequence
  synthetic sequence
APASSSTKKTQLQLEHLLLDLQMILNGINNYKNPELEEMLTAKFYMPKKATELKHLQCLEEELKPLEEVLNLAQSKNFHDLITNINVIVLELKGSETTFMCEYADETATIVEFLNRWITFSQSIISTLT

SEQ ID NO: 246 - protein, 129 aa, artificial sequence
  synthetic sequence
APASSSTKKTQLQLEHLLLDLQMILNGINNYKNPELEEMLTAKFYMPKKATELKHLQCLEEELKPLEEVLNLAQSKNFHDLIRNINVIVLELKGSETTFMCEYADETATIVEFLNRWITFSQSIISTLT

SEQ ID NO: 247 - protein, 129 aa, artificial sequence
  synthetic sequence
APASSSTKKTQLQLEHLLLDLQMILNGINNYKNPELEEMLTAKFYMPKKATELKHLQCLEEELKPLEEVLNLAQSKNFHDLIKNINVIVLELKGSETTFMCEYADETATIVEFLNRWITFSQSIISTLT

SEQ ID NO: 248 - protein, 129 aa, artificial sequence
  synthetic sequence
APASSSTKKTQLQLEHLLLDLQMILNGINNYKNPELEEMLTAKFYMPKKATELKHLQCLEEELKPLEEVLNLAQSKNFHDLILNINVIVLELKGSETTFMCEYADETATIVEFLNRWITFSQSIISTLT

SEQ ID NO: 249 - protein, 129 aa, artificial sequence
  synthetic sequence
APASSSTKKTQLQLEHLLLDLQMILNGINNYKNPELEEMLTAKFYMPKKATELKHLQCLEEELKPLEEVLNLAQSKNFHDLIMNINVIVLELKGSETTFMCEYADETATIVEFLNRWITFSQSIISTLT

SEQ ID NO: 250 - protein, 129 aa, artificial sequence
  synthetic sequence
APASSSTKKTQLQLEHLLLDLQMILNGINNYKNPELEEMLTAKFYMPKKATELKHLQCLEEELKPLEEVLNLAQSKNFHDLIHNINVIVLELKGSETTFMCEYADETATIVEFLNRWITFSQSIISTLT

SEQ ID NO: 251 - protein, 129 aa, artificial sequence
  synthetic sequence
APASSSTKKTQLQLEHLLLDLQMILNGINNYKNPELEEMLTAKFYMPKKATELKHLQCLEEELKPLEEVLNLAQSKNFHDLISDINVIVLELKGSETTFMCEYADETATIVEFLNRWITFSQSIISTLT

SEQ ID NO: 252 - protein, 129 aa, artificial sequence
  synthetic sequence
APASSSTKKTQLQLEHLLLDLQMILNGINNYKNPELEEMLTAKFYMPKKATELKHLQCLEEELKPLEEVLNLAQSKNFHDLISTINVIVLELKGSETTFMCEYADETATIVEFLNRWITFSQSIISTLT

SEQ ID NO: 253 - protein, 129 aa, artificial sequence
  synthetic sequence
APASSSTKKTQLQLEHLLLDLQMILNGINNYKNPELEEMLTAKFYMPKKATELKHLQCLEEELKPLEEVLNLAQSKNFHDLISQINVIVLELKGSETTFMCEYADETATIVEFLNRWITFSQSIISTLT

SEQ ID NO: 254 - protein, 129 aa, artificial sequence
  synthetic sequence
APASSSTKKTQLQLEHLLLDLQMILNGINNYKNPELEEMLTAKFYMPKKATELKHLQCLEEELKPLEEVLNLAQSKNFHDLISRINVIVLELKGSETTFMCEYADETATIVEFLNRWITFSQSIISTLT

SEQ ID NO: 255 - protein, 129 aa, artificial sequence
  synthetic sequence
APASSSTKKTQLQLEHLLLDLQMILNGINNYKNPELEEMLTAKFYMPKKATELKHLQCLEEELKPLEEVLNLAQSKNFHDLISEINVIVLELKGSETTFMCEYADETATIVEFLNRWITFSQSIISTLT

SEQ ID NO: 256 - protein, 129 aa, artificial sequence
  synthetic sequence
APASSSTKKTQLQLEHLLLDLQMILNGINNYKNPELEEMLTAKFYMPKKATELKHLQCLEEELKPLEEVLNLAQSKNFHDLISKINVIVLELKGSETTFMCEYADETATIVEFLNRWITFSQSIISTLT

SEQ ID NO: 257 - protein, 129 aa, artificial sequence
  synthetic sequence
APASSSTKKTQLQLEHLLLDLQMILNGINNYKNPELEEMLTAKFYMPKKATELKHLQCLEEELKPLEEVLNLAQSKNFHDLISHINVIVLELKGSETTFMCEYADETATIVEFLNRWITFSQSIISTLT

SEQ ID NO: 258 - protein, 129 aa, artificial sequence
  synthetic sequence
APASSSTKKTQLQLEHLLLDLQMILNGINNYKNPELEEMLTAKFYMPKKATELKHLQCLEEELKPLEEVLNLAQSKNFHDLISMINVIVLELKGSETTFMCEYADETATIVEFLNRWITFSQSIISTLT

SEQ ID NO: 259 - protein, 129 aa, artificial sequence
  synthetic sequence
APASSSTKKTQLQLEHLLLDLQMILNGINNYKNPELEEMLTAKFYMPKKATELKHLQCLEEELKPLEEVLNLAQSKNFHDLISSINVIVLELKGSETTFMCEYADETATIVEFLNRWITFSQSIISTLT

SEQ ID NO: 260 - protein, 129 aa, artificial sequence
  synthetic sequence
APASSSTKKTQLQLEHLLLDLQMILNGINNYKNPELEEMLTAKFYMPKKATELKHLQCLEEELKPLEEVLNLAQSKNFHDLISLINVIVLELKGSETTFMCEYADETATIVEFLNRWITFSQSIISTLT

SEQ ID NO: 261 - protein, 129 aa, artificial sequence
  synthetic sequence
APASSSTKKTQLQLEHLLLDLQMILNGINNYKNPELEEMLTAKFYMPKKATELKHLQCLEEELKPLEEVLNLAQSKNFHDLISNINIIVLELKGSETTFMCEYADETATIVEFLNRWITFSQSIISTLT

SEQ ID NO: 262 - protein, 129 aa, artificial sequence
  synthetic sequence
APASSSTKKTQLQLEHLLLDLQMILNGINNYKNPELEEMLTAKFYMPKKATELKHLQCLEEELKPLEEVLNLAQSKNFHDLISNINLIVLELKGSETTFMCEYADETATIVEFLNRWITFSQSIISTLT

SEQ ID NO: 263 - protein, 129 aa, artificial sequence
  synthetic sequence
APASSSTKKTQLQLEHLLLDLQMILNGINNYKNPELEEMLTAKFYMPKKATELKHLQCLEEELKPLEEVLNLAQSKNFHDLISNINDIVLELKGSETTFMCEYADETATIVEFLNRWITFSQSIISTLT

SEQ ID NO: 264 - protein, 129 aa, artificial sequence
  synthetic sequence
APASSSTKKTQLQLEHLLLDLQMILNGINNYKNPELEEMLTAKFYMPKKATELKHLQCLEEELKPLEEVLNLAQSKNFHDLISNINEIVLELKGSETTFMCEYADETATIVEFLNRWITFSQSIISTLT

SEQ ID NO: 265 - protein, 129 aa, artificial sequence
  synthetic sequence
APASSSTKKTQLQLEHLLLDLQMILNGINNYKNPELEEMLTAKFYMPKKATELKHLQCLEEELKPLEEVLNLAQSKNFHDLISNINNIVLELKGSETTFMCEYADETATIVEFLNRWITFSQSIISTLT

SEQ ID NO: 266 - protein, 129 aa, artificial sequence
  synthetic sequence
APASSSTKKTQLQLEHLLLDLQMILNGINNYKNPELEEMLTAKFYMPKKATELKHLQCLEEELKPLEEVLNLAQSKNFHDLISNINQIVLELKGSETTFMCEYADETATIVEFLNRWITFSQSIISTLT

SEQ ID NO: 267 - protein, 129 aa, artificial sequence
  synthetic sequence
APASSSTKKTQLQLEHLLLDLQMILNGINNYKNPELEEMLTAKFYMPKKATELKHLQCLEEELKPLEEVLNLAQSKNFHDLISNINSIVLELKGSETTFMCEYADETATIVEFLNRWITFSQSIISTLT

SEQ ID NO: 268 - protein, 129 aa, artificial sequence
  synthetic sequence
APASSSTKKTQLQLEHLLLDLQMILNGINNYKNPELEEMLTAKFYMPKKATELKHLQCLEEELKPLEEVLNLAQSKNFHDLISNINHIVLELKGSETTFMCEYADETATIVEFLNRWITFSQSIISTLT

SEQ ID NO: 269 - protein, 129 aa, artificial sequence
  synthetic sequence
APASSSTKKTQLQLEHLLLDLQMILNGINNYKNPELEEMLTAKFYMPKKATELKHLQCLEEELKPLEEVLNLAQSKNFHDLISNINVEVLELKGSETTFMCEYADETATIVEFLNRWITFSQSIISTLT

SEQ ID NO: 270 - protein, 129 aa, artificial sequence
  synthetic sequence
APASSSTKKTQLQLEHLLLDLQMILNGINNYKNPELEEMLTAKFYMPKKATELKHLQCLEEELKPLEEVLNLAQSKNFHDLISNINVTVLELKGSETTFMCEYADETATIVEFLNRWITFSQSIISTLT

SEQ ID NO: 271 - protein, 129 aa, artificial sequence
  synthetic sequence
APASSSTKKTQLQLEHLLLDLQMILNGINNYKNPELEEMLTAKFYMPKKATELKHLQCLEEELKPLEEVLNLAQSKNFHDLISNINVKVLELKGSETTFMCEYADETATIVEFLNRWITFSQSIISTLT

SEQ ID NO: 272 - protein, 129 aa, artificial sequence
  synthetic sequence
APASSSTKKTQLQLEHLLLDLQMILNGINNYKNPELEEMLTAKFYMPKKATELKHLQCLEEELKPLEEVLNLAQSKNFHDLISNINVRVLELKGSETTFMCEYADETATIVEFLNRWITFSQSIISTLT

SEQ ID NO: 273 - protein, 129 aa, artificial sequence
  synthetic sequence
APASSSTKKTQLQLEHLLLDLQMILNGINNYKNPELEEMLTAKFYMPKKATELKHLQCLEEELKPLEEVLNLAQSKNFHDLISNINVLVLELKGSETTFMCEYADETATIVEFLNRWITFSQSIISTLT

SEQ ID NO: 274 - protein, 129 aa, artificial sequence
  synthetic sequence
APASSSTKKTQLQLEHLLLDLQMILNGINNYKNPELEEMLTAKFYMPKKATELKHLQCLEEELKPLEEVLNLAQSKNFHDLISNINVIVLQLKGSETTFMCEYADETATIVEFLNRWITFSQSIISTLT

SEQ ID NO: 275 - protein, 129 aa, artificial sequence
  synthetic sequence
APASSSTKKTQLQLEHLLLDLQMILNGINNYKNPELEEMLTAKFYMPKKATELKHLQCLEEELKPLEEVLNLAQSKNFHDLISNINVIVLGLKGSETTFMCEYADETATIVEFLNRWITFSQSIISTLT

SEQ ID NO: 276 - protein, 129 aa, artificial sequence
  synthetic sequence
APASSSTKKTQLQLEHLLLDLQMILNGINNYKNPELEEMLTAKFYMPKKATELKHLQCLEEELKPLEEVLNLAQSKNFHDLISNINVIVLDLKGSETTFMCEYADETATIVEFLNRWITFSQSIISTLT

SEQ ID NO: 277 - protein, 129 aa, artificial sequence
  synthetic sequence
APASSSTKKTQLQLEHLLLDLQMILNGINNYKNPELEEMLTAKFYMPKKATELKHLQCLEEELKPLEEVLNLAQSKNFHDLISNINVIVLNLKGSETTFMCEYADETATIVEFLNRWITFSQSIISTLT

SEQ ID NO: 278 - protein, 129 aa, artificial sequence
  synthetic sequence
APASSSTKKTQLQLEHLLLDLQMILNGINNYKNPELEEMLTAKFYMPKKATELKHLQCLEEELKPLEEVLNLAQSKNFHDLISNINVIVLELKGSETTFMCEYADETATIVEFLNRWITFSESIISTLT

SEQ ID NO: 279 - protein, 129 aa, artificial sequence
  synthetic sequence
APASSSTKKTQLQLEHLLLDLQMILNGINNYKNPELEEMLTAKFYMPKKATELKHLQCLEEELKPLEEVLNLAQSKNFHDLISNINVIVLELKGSETTFMCEYADETATIVEFLNRWITFSDSIISTLT

SEQ ID NO: 280 - protein, 129 aa, artificial sequence
  synthetic sequence
APASSSTKKTQLQLEHLLLDLQMILNGINNYKNPELEEMLTAKFYMPKKATELKHLQCLEEELKPLEEVLNLAQSKNFHDLISNINVIVLELKGSETTFMCEYADETATIVEFLNRWITFSASIISTLT

SEQ ID NO: 281 - protein, 129 aa, artificial sequence
  synthetic sequence
APASSSTKKTQLQLEHLLLDLQMILNGINNYKNPELEEMLTAKFYMPKKATELKHLQCLEEELKPLEEVLNLAQSKNFHDLISNINVIVLELKGSETTFMCEYADETATIVEFLNRWITFSSSIISTLT

SEQ ID NO: 282 - protein, 129 aa, artificial sequence
  synthetic sequence
APASSSTKKTQLQLEHLLLDLQMILNGINNYKNPELEEMLTAKFYMPKKATELKHLQCLEEELKPLEEVLNLAQSKNFHNLISNINVIVLQLKGSETTFMCEYADETATIVEFLNRWITFSQSIISTLT

SEQ ID NO: 283 - protein, 129 aa, artificial sequence
  synthetic sequence
APASSSTKKTQLQLEHLLLDLQMILNGINNYKNPELEEMLTAKFYMPKKATELKHLQCLEEELKPLEEVLNLAQSKNFHELISNINVIVLQLKGSETTFMCEYADETATIVEFLNRWITFSQSIISTLT

SEQ ID NO: 284 - protein, 129 aa, artificial sequence
  synthetic sequence
APASSSTKKTQLQLEHLLLDLQMILNGINNYKNPELEEMLTAKFYMPKKATELKHLQCLEEELKPLEEVLNLAQSKNFHTLISNINVIVLQLKGSETTFMCEYADETATIVEFLNRWITFSQSIISTLT

SEQ ID NO: 285 - protein, 129 aa, artificial sequence
  synthetic sequence
APASSSTKKTQLQLEHLLLDLQMILNGINNYKNPELEEMLTAKFYMPKKATELKHLQCLEEELKPLEEVLNLAQSKNFHQLISNINVIVLQLKGSETTFMCEYADETATIVEFLNRWITFSQSIISTLT

SEQ ID NO: 286 - protein, 129 aa, artificial sequence
  synthetic sequence
APASSSTKKTQLQLETLLLDLQMILNGINNYKNPELEEMLTAKFYMPKKATELKHLQCLEEELKPLEEVLNLAQSKNFHTLISNINVIVLELKGSETTFMCEYADETATIVEFLNRWITFSQSIISTLT

SEQ ID NO: 287 - protein, 129 aa, artificial sequence
  synthetic sequence
APASSSTKKTQLQLEHLLLDLQMILNGINNYKNPELEEMLTAKFYMPKKATELKHLQCLEEELKPLEEVLNLAQSKNFHNLISNINIIVLELKGSETTFMCEYADETATIVEFLNRWITFSQSIISTLT

SEQ ID NO: 288 - protein, 129 aa, artificial sequence
  synthetic sequence
APASSSTKKTQLQLEHLLLDLQMILNGINNYKNPELEEMLTAKFYMPKKATELKHLQCLEEELKPLEEVLNLAQSKNFHTLISNINVIVLELKGSETTFMCEYADETATIVEFLNRWITFSESIISTLT

SEQ ID NO: 289 - protein, 129 aa, artificial sequence
  synthetic sequence
APASSSTKKTQLQLEHLLLDLQMILNGINNYKNPELEEMLTAKFYMPKKATELKHLQCLEEELKPLEEVLNLAQSKNFHNLISNINVIVLELKGSETTFMCEYADETATIVEFLNRWITFSESIISTLT

SEQ ID NO: 290 - protein, 129 aa, artificial sequence
  synthetic sequence
APASSSTKKTQLQLETLLLDLQMILNGINNYKNPELEEMLTAKFYMPKKATELKHLQCLEEELKPLEEVLNLAQSKNFHQLISNINVIVLELKGSETTFMCEYADETATIVEFLNRWITFSQSIISTLT

SEQ ID NO: 291 - protein, 129 aa, artificial sequence
  synthetic sequence
APASSSTKKTQLQLETLLLDLQMILNGINNYKNPELEEMLTAKFYMPKKATELKHLQCLEEELKPLEEVLNLAQSKNFHDLISNINIIVLELKGSETTFMCEYADETATIVEFLNRWITFSQSIISTLT

SEQ ID NO: 292 - protein, 133 aa, artificial sequence; identical to SEQ ID NO: 31
  synthetic sequence

SEQ ID NO: 293 - protein, 133 aa, artificial sequence
  synthetic sequence
APASSSTKKTQLQLEHLLLDLQMILNGINNYKNPELEEMLTFKFYMPKKATELKHLQCLEEELKPLEEVLNLAQSKNFHLRPRNLISNINVIVLELKGSETTFMCEYADETATIVEFLNRWITFSQSIISTLT

SEQ ID NO: 294 - protein, 133 aa, artificial sequence
  synthetic sequence
APASSSTKKTQLQLEHLLLDLQMILNGINNYKNPELEEMLTFKFYMPKKATELKHLQCLEEELKPLEEVLNLAQSKNFHLRPRQLISNINVIVLELKGSETTFMCEYADETATIVEFLNRWITFSQSIISTLT

SEQ ID NO: 295 - protein, 133 aa, artificial sequence
  synthetic sequence
APASSSTKKTQLQLEHLLLDLQMILNGINNYKNPELEEMLTFKFYMPKKATELKHLQCLEEELKPLEEVLNLAQSKNFHLRPRDLISNINVIVLNLKGSETTFMCEYADETATIVEFLNRWITFSQSIISTLT

SEQ ID NO: 296 - protein, 133 aa, artificial sequence
  synthetic sequence
APASSSTKKTQLQLEHLLLDLQMILNGINNYKNPELEEMLTFKFYMPKKATELKHLQCLEEELKPLEEVLNLAQSKNFHLRPRNLISNINVIVLNLKGSETTFMCEYADETATIVEFLNRWITFSQSIISTLT

SEQ ID NO: 297 - protein, 133 aa, artificial sequence
  synthetic sequence
APASSSTKKTQLQLENLLLDLQMILNGINNYKNPELEEMLTFKFYMPKKATELKHLQCLEEELKPLEEVLNLAQSKNFHLRPRDLISNINVIVLELKGSETTFMCEYADETATIVEFLNRWITFSQSIISTLT

SEQ ID NO: 298 - protein, 133 aa, artificial sequence
  synthetic sequence
APASSSTKKTQLQLENLLLDLQMILNGINNYKNPELEEMLTFKFYMPKKATELKHLQCLEEELKPLEEVLNLAQSKNFHLRPRNLISNINVIVLELKGSETTFMCEYADETATIVEFLNRWITFSQSIISTLT

SEQ ID NO: 299 - protein, 129 aa, artificial sequence; identical to SEQ ID NO: 32
  synthetic sequence

SEQ ID NO: 300 - protein, 129 aa, artificial sequence
  synthetic sequence
APASSSTKKTQRQLEHLLLDLQMILNGINNYKNPELEEMLTFKFYMPKKATELKHLQCLEEELKPLEEVLNLAGDASIHDLISNINVIVLELKGSETTFMCEYADETATIVEFLNRWITFSQSIISTLT

SEQ ID NO: 301 - protein, 129 aa, artificial sequence
  synthetic sequence
APASSSTKKTQKQLEHLLLDLQMILNGINNYKNPELEEMLTFKFYMPKKATELKHLQCLEEELKPLEEVLNLAGDASIHDLISNINVIVLELKGSETTFMCEYADETATIVEFLNRWITFSQSIISTLT

SEQ ID NO: 302 - protein, 129 aa, artificial sequence
  synthetic sequence
APASSSTKKTQEQLEHLLLDLQMILNGINNYKNPELEEMLTFKFYMPKKATELKHLQCLEEELKPLEEVLNLAGDASIHDLISNINVIVLELKGSETTFMCEYADETATIVEFLNRWITFSQSIISTLT

SEQ ID NO: 303 - protein, 129 aa, artificial sequence
  synthetic sequence
APASSSTKKTQQQLEHLLLDLQMILNGINNYKNPELEEMLTFKFYMPKKATELKHLQCLEEELKPLEEVLNLAGDASIHDLISNINVIVLELKGSETTFMCEYADETATIVEFLNRWITFSQSIISTLT

SEQ ID NO: 304 - protein, 129 aa, artificial sequence
  synthetic sequence
APASSSTKKTQLQLQHLLLDLQMILNGINNYKNPELEEMLTFKFYMPKKATELKHLQCLEEELKPLEEVLNLAGDASIHDLISNINVIVLELKGSETTFMCEYADETATIVEFLNRWITFSQSIISTLT

SEQ ID NO: 305 - protein, 129 aa, artificial sequence
  synthetic sequence
APASSSTKKTQLQLRHLLLDLQMILNGINNYKNPELEEMLTFKFYMPKKATELKHLQCLEEELKPLEEVLNLAGDASIHDLISNINVIVLELKGSETTFMCEYADETATIVEFLNRWITFSQSIISTLT

SEQ ID NO: 306 - protein, 129 aa, artificial sequence
  synthetic sequence
APASSSTKKTQLQLAHLLLDLQMILNGINNYKNPELEEMLTFKFYMPKKATELKHLQCLEEELKPLEEVLNLAGDASIHDLISNINVIVLELKGSETTFMCEYADETATIVEFLNRWITFSQSIISTLT

SEQ ID NO: 307 - protein, 129 aa, artificial sequence
  synthetic sequence
APASSSTKKTQLQLSHLLLDLQMILNGINNYKNPELEEMLTFKFYMPKKATELKHLQCLEEELKPLEEVLNLAGDASIHDLISNINVIVLELKGSETTFMCEYADETATIVEFLNRWITFSQSIISTLT

SEQ ID NO: 308 - protein, 129 aa, artificial sequence
  synthetic sequence
APASSSTKKTQLQLENLLLDLQMILNGINNYKNPELEEMLTFKFYMPKKATELKHLQCLEEELKPLEEVLNLAGDASIHDLISNINVIVLELKGSETTFMCEYADETATIVEFLNRWITFSQSIISTLT

SEQ ID NO: 309 - protein, 129 aa, artificial sequence
  synthetic sequence
APASSSTKKTQLQLETLLLDLQMILNGINNYKNPELEEMLTFKFYMPKKATELKHLQCLEEELKPLEEVLNLAGDASIHDLISNINVIVLELKGSETTFMCEYADETATIVEFLNRWITFSQSIISTLT

SEQ ID NO: 310 - protein, 129 aa, artificial sequence
  synthetic sequence
APASSSTKKTQLQLEYLLLDLQMILNGINNYKNPELEEMLTFKFYMPKKATELKHLQCLEEELKPLEEVLNLAGDASIHDLISNINVIVLELKGSETTFMCEYADETATIVEFLNRWITFSQSIISTLT

SEQ ID NO: 311 - protein, 129 aa, artificial sequence
  synthetic sequence
APASSSTKKTQLQLEALLLDLQMILNGINNYKNPELEEMLTFKFYMPKKATELKHLQCLEEELKPLEEVLNLAGDASIHDLISNINVIVLELKGSETTFMCEYADETATIVEFLNRWITFSQSIISTLT

SEQ ID NO: 312 - protein, 129 aa, artificial sequence
  synthetic sequence
APASSSTKKTQLQLEELLLDLQMILNGINNYKNPELEEMLTFKFYMPKKATELKHLQCLEEELKPLEEVLNLAGDASIHDLISNINVIVLELKGSETTFMCEYADETATIVEFLNRWITFSQSIISTLT

SEQ ID NO: 313 - protein, 129 aa, artificial sequence
  synthetic sequence
APASSSTKKTQLQLEDLLLDLQMILNGINNYKNPELEEMLTFKFYMPKKATELKHLQCLEEELKPLEEVLNLAGDASIHDLISNINVIVLELKGSETTFMCEYADETATIVEFLNRWITFSQSIISTLT

SEQ ID NO: 314 - protein, 129 aa, artificial sequence
  synthetic sequence
APASSSTKKTQLQLERLLLDLQMILNGINNYKNPELEEMLTFKFYMPKKATELKHLQCLEEELKPLEEVLNLAGDASIHDLISNINVIVLELKGSETTFMCEYADETATIVEFLNRWITFSQSIISTLT

SEQ ID NO: 315 - protein, 129 aa, artificial sequence
  synthetic sequence
APASSSTKKTQLQLEHLLDDLQMILNGINNYKNPELEEMLTFKFYMPKKATELKHLQCLEEELKPLEEVLNLAGDASIHDLISNINVIVDELKGSETTFMCEYADETATIVEFLNRWITFSQSIISTLT

SEQ ID NO: 316 - protein, 129 aa, artificial sequence
  synthetic sequence
APASSSTKKTQLQLEHLLEDLQMILNGINNYKNPELEEMLTFKFYMPKKATELKHLQCLEEELKPLEEVLNLAGDASIHDLISNINVIVEELKGSETTFMCEYADETATIVEFLNRWITFSQSIISTLT

SEQ ID NO: 317 - protein, 129 aa, artificial sequence
  synthetic sequence
APASSSTKKTQLQLEHLLRDLQMILNGINNYKNPELEEMLTFKFYMPKKATELKHLQCLEEELKPLEEVLNLAGDASIHDLISNINVIVRELKGSETTFMCEYADETATIVEFLNRWITFSQSIISTLT

SEQ ID NO: 318 - protein, 129 aa, artificial sequence
  synthetic sequence
APASSSTKKTQLQLEHLLSDLQMILNGINNYKNPELEEMLTFKFYMPKKATELKHLQCLEEELKPLEEVLNLAGDASIHDLISNINVIVSELKGSETTFMCEYADETATIVEFLNRWITFSQSIISTLT

SEQ ID NO: 319 - protein, 129 aa, artificial sequence
  synthetic sequence
APASSSTKKTQLQLEHLLLNLQMILNGINNYKNPELEEMLTFKFYMPKKATELKHLQCLEEELKPLEEVLNLAGDASIHDLISNINVIVLELKGSETTFMCEYADETATIVEFLNRWITFSQSIISTLT

SEQ ID NO: 320 - protein, 129 aa, artificial sequence
  synthetic sequence
APASSSTKKTQLQLEHLLLQLQMILNGINNYKNPELEEMLTFKFYMPKKATELKHLQCLEEELKPLEEVLNLAGDASIHDLISNINVIVLELKGSETTFMCEYADETATIVEFLNRWITFSQSIISTLT

SEQ ID NO: 321 - protein, 129 aa, artificial sequence
  synthetic sequence
APASSSTKKTQLQLEHLLLELQMILNGINNYKNPELEEMLTFKFYMPKKATELKHLQCLEEELKPLEEVLNLAGDASIHDLISNINVIVLELKGSETTFMCEYADETATIVEFLNRWITFSQSIISTLT

SEQ ID NO: 322 - protein, 129 aa, artificial sequence
  synthetic sequence
APASSSTKKTQLQLEHLLLALQMILNGINNYKNPELEEMLTFKFYMPKKATELKHLQCLEEELKPLEEVLNLAGDASIHDLISNINVIVLELKGSETTFMCEYADETATIVEFLNRWITFSQSIISTLT

SEQ ID NO: 323 - protein, 129 aa, artificial sequence
  synthetic sequence
APASSSTKKTQLQLEHLLLRLQMILNGINNYKNPELEEMLTFKFYMPKKATELKHLQCLEEELKPLEEVLNLAGDASIHDLISNINVIVLELKGSETTFMCEYADETATIVEFLNRWITFSQSIISTLT

SEQ ID NO: 324 - protein, 129 aa, artificial sequence
  synthetic sequence
APASSSTKKTQLQLEHLLLSLQMILNGINNYKNPELEEMLTFKFYMPKKATELKHLQCLEEELKPLEEVLNLAGDASIHDLISNINVIVLELKGSETTFMCEYADETATIVEFLNRWITFSQSIISTLT

SEQ ID NO: 325 - protein, 129 aa, artificial sequence
  synthetic sequence
APASSSTKKTQLQLEHLLLDLQMILNGINNYKNPELEEMLTFKFYMPKKATELKHLQCLEEELKPLEEVLNLAGDASIHNLISNINVIVLELKGSETTFMCEYADETATIVEFLNRWITFSQSIISTLT

SEQ ID NO: 326 - protein, 129 aa, artificial sequence
  synthetic sequence
APASSSTKKTQLQLEHLLLDLQMILNGINNYKNPELEEMLTFKFYMPKKATELKHLQCLEEELKPLEEVLNLAGDASIHELISNINVIVLELKGSETTFMCEYADETATIVEFLNRWITFSQSIISTLT

SEQ ID NO: 327 - protein, 129 aa, artificial sequence
  synthetic sequence
APASSSTKKTQLQLEHLLLDLQMILNGINNYKNPELEEMLTFKFYMPKKATELKHLQCLEEELKPLEEVLNLAGDASIHQLISNINVIVLELKGSETTFMCEYADETATIVEFLNRWITFSQSIISTLT

SEQ ID NO: 328 - protein, 129 aa, artificial sequence
  synthetic sequence
APASSSTKKTQLQLEHLLLDLQMILNGINNYKNPELEEMLTFKFYMPKKATELKHLQCLEEELKPLEEVLNLAGDASIHTLISNINVIVLELKGSETTFMCEYADETATIVEFLNRWITFSQSIISTLT

SEQ ID NO: 329 - protein, 129 aa, artificial sequence
  synthetic sequence
APASSSTKKTQLQLEHLLLDLQMILNGINNYKNPELEEMLTFKFYMPKKATELKHLQCLEEELKPLEEVLNLAGDASIHSLISNINVIVLELKGSETTFMCEYADETATIVEFLNRWITFSQSIISTLT

SEQ ID NO: 330 - protein, 129 aa, artificial sequence
  synthetic sequence
APASSSTKKTQLQLEHLLLDLQMILNGINNYKNPELEEMLTFKFYMPKKATELKHLQCLEEELKPLEEVLNLAGDASIHRLISNINVIVLELKGSETTFMCEYADETATIVEFLNRWITFSQSIISTLT

SEQ ID NO: 331 - protein, 129 aa, artificial sequence
  synthetic sequence
APASSSTKKTQLQLEHLLLDLQMILNGINNYKNPELEEMLTFKFYMPKKATELKHLQCLEEELKPLEEVLNLAGDASIHGLISNINVIVLELKGSETTFMCEYADETATIVEFLNRWITFSQSIISTLT

SEQ ID NO: 332 - protein, 129 aa, artificial sequence
  synthetic sequence
APASSSTKKTQLQLEHLLLDLQMILNGINNYKNPELEEMLTFKFYMPKKATELKHLQCLEEELKPLEEVLNLAGDASIHMLISNINVIVLELKGSETTFMCEYADETATIVEFLNRWITFSQSIISTLT

SEQ ID NO: 333 - protein, 129 aa, artificial sequence
  synthetic sequence
APASSSTKKTQLQLEHLLLDLQMILNGINNYKNPELEEMLTFKFYMPKKATELKHLQCLEEELKPLEEVLNLAGDASIHFLISNINVIVLELKGSETTFMCEYADETATIVEFLNRWITFSQSIISTLT

SEQ ID NO: 334 - protein, 129 aa, artificial sequence
  synthetic sequence
APASSSTKKTQLQLEHLLLDLQMILNGINNYKNPELEEMLTFKFYMPKKATELKHLQCLEEELKPLEEVLNLAGDASIHLLISNINVIVLELKGSETTFMCEYADETATIVEFLNRWITFSQSIISTLT

SEQ ID NO: 335 - protein, 129 aa, artificial sequence
  synthetic sequence
APASSSTKKTQLQLEHLLLDLQMILNGINNYKNPELEEMLTFKFYMPKKATELKHLQCLEEELKPLEEVLNLAGDASIHKLISNINVIVLELKGSETTFMCEYADETATIVEFLNRWITFSQSIISTLT

SEQ ID NO: 336 - protein, 129 aa, artificial sequence
  synthetic sequence
APASSSTKKTQLQLEHLLLDLQMILNGINNYKNPELEEMLTFKFYMPKKATELKHLQCLEEELKPLEEVLNLAGDASIHHLISNINVIVLELKGSETTFMCEYADETATIVEFLNRWITFSQSIISTLT

SEQ ID NO: 337 - protein, 129 aa, artificial sequence
  synthetic sequence
APASSSTKKTQLQLEHLLLDLQMILNGINNYKNPELEEMLTFKFYMPKKATELKHLQCLEEELKPLEEVLNLAGDASIHDLITNINVIVLELKGSETTFMCEYADETATIVEFLNRWITFSQSIISTLT

SEQ ID NO: 338 - protein, 129 aa, artificial sequence
  synthetic sequence
APASSSTKKTQLQLEHLLLDLQMILNGINNYKNPELEEMLTFKFYMPKKATELKHLQCLEEELKPLEEVLNLAGDASIHDLIRNINVIVLELKGSETTFMCEYADETATIVEFLNRWITFSQSIISTLT

SEQ ID NO: 339 - protein, 129 aa, artificial sequence
  synthetic sequence
APASSSTKKTQLQLEHLLLDLQMILNGINNYKNPELEEMLTFKFYMPKKATELKHLQCLEEELKPLEEVLNLAGDASIHDLIKNINVIVLELKGSETTFMCEYADETATIVEFLNRWITFSQSIISTLT

SEQ ID NO: 340 - protein, 129 aa, artificial sequence
  synthetic sequence
APASSSTKKTQLQLEHLLLDLQMILNGINNYKNPELEEMLTFKFYMPKKATELKHLQCLEEELKPLEEVLNLAGDASIHDLILNINVIVLELKGSETTFMCEYADETATIVEFLNRWITFSQSIISTLT

SEQ ID NO: 341 - protein, 129 aa, artificial sequence
  synthetic sequence
APASSSTKKTQLQLEHLLLDLQMILNGINNYKNPELEEMLTFKFYMPKKATELKHLQCLEEELKPLEEVLNLAGDASIHDLIMNINVIVLELKGSETTFMCEYADETATIVEFLNRWITFSQSIISTLT

SEQ ID NO: 342 - protein, 129 aa, artificial sequence
  synthetic sequence
APASSSTKKTQLQLEHLLLDLQMILNGINNYKNPELEEMLTFKFYMPKKATELKHLQCLEEELKPLEEVLNLAGDASIHDLIHNINVIVLELKGSETTFMCEYADETATIVEFLNRWITFSQSIISTLT

SEQ ID NO: 343 - protein, 129 aa, artificial sequence
  synthetic sequence
APASSSTKKTQLQLEHLLLDLQMILNGINNYKNPELEEMLTFKFYMPKKATELKHLQCLEEELKPLEEVLNLAGDASIHDLISDINVIVLELKGSETTFMCEYADETATIVEFLNRWITFSQSIISTLT

SEQ ID NO: 344 - protein, 129 aa, artificial sequence
  synthetic sequence
APASSSTKKTQLQLEHLLLDLQMILNGINNYKNPELEEMLTFKFYMPKKATELKHLQCLEEELKPLEEVLNLAGDASIHDLISTINVIVLELKGSETTFMCEYADETATIVEFLNRWITFSQSIISTLT

SEQ ID NO: 345 - protein, 129 aa, artificial sequence
  synthetic sequence
APASSSTKKTQLQLEHLLLDLQMILNGINNYKNPELEEMLTFKFYMPKKATELKHLQCLEEELKPLEEVLNLAGDASIHDLISQINVIVLELKGSETTFMCEYADETATIVEFLNRWITFSQSIISTLT

SEQ ID NO: 346 - protein, 129 aa, artificial sequence
  synthetic sequence
APASSSTKKTQLQLEHLLLDLQMILNGINNYKNPELEEMLTFKFYMPKKATELKHLQCLEEELKPLEEVLNLAGDASIHDLISRINVIVLELKGSETTFMCEYADETATIVEFLNRWITFSQSIISTLT

SEQ ID NO: 347 - protein, 129 aa, artificial sequence
  synthetic sequence
APASSSTKKTQLQLEHLLLDLQMILNGINNYKNPELEEMLTFKFYMPKKATELKHLQCLEEELKPLEEVLNLAGDASIHDLISEINVIVLELKGSETTFMCEYADETATIVEFLNRWITFSQSIISTLT

SEQ ID NO: 348 - protein, 129 aa, artificial sequence
  synthetic sequence
APASSSTKKTQLQLEHLLLDLQMILNGINNYKNPELEEMLTFKFYMPKKATELKHLQCLEEELKPLEEVLNLAGDASIHDLISKINVIVLELKGSETTFMCEYADETATIVEFLNRWITFSQSIISTLT

SEQ ID NO: 349 - protein, 129 aa, artificial sequence
  synthetic sequence
APASSSTKKTQLQLEHLLLDLQMILNGINNYKNPELEEMLTFKFYMPKKATELKHLQCLEEELKPLEEVLNLAGDASIHDLISHINVIVLELKGSETTFMCEYADETATIVEFLNRWITFSQSIISTLT

SEQ ID NO: 350 - protein, 129 aa, artificial sequence
  synthetic sequence
APASSSTKKTQLQLEHLLLDLQMILNGINNYKNPELEEMLTFKFYMPKKATELKHLQCLEEELKPLEEVLNLAGDASIHDLISMINVIVLELKGSETTFMCEYADETATIVEFLNRWITFSQSIISTLT

SEQ ID NO: 351 - protein, 129 aa, artificial sequence
  synthetic sequence
APASSSTKKTQLQLEHLLLDLQMILNGINNYKNPELEEMLTFKFYMPKKATELKHLQCLEEELKPLEEVLNLAGDASIHDLISSINVIVLELKGSETTFMCEYADETATIVEFLNRWITFSQSIISTLT

SEQ ID NO: 352 - protein, 129 aa, artificial sequence
  synthetic sequence
APASSSTKKTQLQLEHLLLDLQMILNGINNYKNPELEEMLTFKFYMPKKATELKHLQCLEEELKPLEEVLNLAGDASIHDLISLINVIVLELKGSETTFMCEYADETATIVEFLNRWITFSQSIISTLT

SEQ ID NO: 353 - protein, 129 aa, artificial sequence
  synthetic sequence
APASSSTKKTQLQLEHLLLDLQMILNGINNYKNPELEEMLTFKFYMPKKATELKHLQCLEEELKPLEEVLNLAGDASIHDLISNINIIVLELKGSETTFMCEYADETATIVEFLNRWITFSQSIISTLT

SEQ ID NO: 354 - protein, 129 aa, artificial sequence
  synthetic sequence
APASSSTKKTQLQLEHLLLDLQMILNGINNYKNPELEEMLTFKFYMPKKATELKHLQCLEEELKPLEEVLNLAGDASIHDLISNINLIVLELKGSETTFMCEYADETATIVEFLNRWITFSQSIISTLT

SEQ ID NO: 355 - protein, 129 aa, artificial sequence
  synthetic sequence
APASSSTKKTQLQLEHLLLDLQMILNGINNYKNPELEEMLTFKFYMPKKATELKHLQCLEEELKPLEEVLNLAGDASIHDLISNINDIVLELKGSETTFMCEYADETATIVEFLNRWITFSQSIISTLT

SEQ ID NO: 356 - protein, 129 aa, artificial sequence
  synthetic sequence
APASSSTKKTQLQLEHLLLDLQMILNGINNYKNPELEEMLTFKFYMPKKATELKHLQCLEEELKPLEEVLNLAGDASIHDLISNINEIVLELKGSETTFMCEYADETATIVEFLNRWITFSQSIISTLT

SEQ ID NO: 357 - protein, 129 aa, artificial sequence
  synthetic sequence
APASSSTKKTQLQLEHLLLDLQMILNGINNYKNPELEEMLTFKFYMPKKATELKHLQCLEEELKPLEEVLNLAGDASIHDLISNINNIVLELKGSETTFMCEYADETATIVEFLNRWITFSQSIISTLT

SEQ ID NO: 358 - protein, 129 aa, artificial sequence
  synthetic sequence
APASSSTKKTQLQLEHLLLDLQMILNGINNYKNPELEEMLTFKFYMPKKATELKHLQCLEEELKPLEEVLNLAGDASIHDLISNINQIVLELKGSETTFMCEYADETATIVEFLNRWITFSQSIISTLT

SEQ ID NO: 359 - protein, 129 aa, artificial sequence
  synthetic sequence
APASSSTKKTQLQLEHLLLDLQMILNGINNYKNPELEEMLTFKFYMPKKATELKHLQCLEEELKPLEEVLNLAGDASIHDLISNINSIVLELKGSETTFMCEYADETATIVEFLNRWITFSQSIISTLT

SEQ ID NO: 360 - protein, 129 aa, artificial sequence
  synthetic sequence
APASSSTKKTQLQLEHLLLDLQMILNGINNYKNPELEEMLTFKFYMPKKATELKHLQCLEEELKPLEEVLNLAGDASIHDLISNINHIVLELKGSETTFMCEYADETATIVEFLNRWITFSQSIISTLT

SEQ ID NO: 361 - protein, 129 aa, artificial sequence
  synthetic sequence
APASSSTKKTQLQLEHLLLDLQMILNGINNYKNPELEEMLTFKFYMPKKATELKHLQCLEEELKPLEEVLNLAGDASIHDLISNINVEVLELKGSETTFMCEYADETATIVEFLNRWITFSQSIISTLT

SEQ ID NO: 362 - protein, 129 aa, artificial sequence
  synthetic sequence
APASSSTKKTQLQLEHLLLDLQMILNGINNYKNPELEEMLTFKFYMPKKATELKHLQCLEEELKPLEEVLNLAGDASIHDLISNINVTVLELKGSETTFMCEYADETATIVEFLNRWITFSQSIISTLT

SEQ ID NO: 363 - protein, 129 aa, artificial sequence
  synthetic sequence
APASSSTKKTQLQLEHLLLDLQMILNGINNYKNPELEEMLTFKFYMPKKATELKHLQCLEEELKPLEEVLNLAGDASIHDLISNINVKVLELKGSETTFMCEYADETATIVEFLNRWITFSQSIISTLT

SEQ ID NO: 364 - protein, 129 aa, artificial sequence
  synthetic sequence
APASSSTKKTQLQLEHLLLDLQMILNGINNYKNPELEEMLTFKFYMPKKATELKHLQCLEEELKPLEEVLNLAGDASIHDLISNINVRVLELKGSETTFMCEYADETATIVEFLNRWITFSQSIISTLT

SEQ ID NO: 365 - protein, 129 aa, artificial sequence
  synthetic sequence
APASSSTKKTQLQLEHLLLDLQMILNGINNYKNPELEEMLTFKFYMPKKATELKHLQCLEEELKPLEEVLNLAGDASIHDLISNINVLVLELKGSETTFMCEYADETATIVEFLNRWITFSQSIISTLT

SEQ ID NO: 366 - protein, 129 aa, artificial sequence
  synthetic sequence
APASSSTKKTQLQLEHLLLDLQMILNGINNYKNPELEEMLTFKFYMPKKATELKHLQCLEEELKPLEEVLNLAGDASIHDLISNINVIVLQLKGSETTFMCEYADETATIVEFLNRWITFSQSIISTLT

SEQ ID NO: 367 - protein, 129 aa, artificial sequence
  synthetic sequence
APASSSTKKTQLQLEHLLLDLQMILNGINNYKNPELEEMLTFKFYMPKKATELKHLQCLEEELKPLEEVLNLAGDASIHDLISNINVIVLGLKGSETTFMCEYADETATIVEFLNRWITFSQSIISTLT

SEQ ID NO: 368 - protein, 129 aa, artificial sequence
  synthetic sequence
APASSSTKKTQLQLEHLLLDLQMILNGINNYKNPELEEMLTFKFYMPKKATELKHLQCLEEELKPLEEVLNLAGDASIHDLISNINVIVLDLKGSETTFMCEYADETATIVEFLNRWITFSQSIISTLT

SEQ ID NO: 369 - protein, 129 aa, artificial sequence
  synthetic sequence
APASSSTKKTQLQLEHLLLDLQMILNGINNYKNPELEEMLTFKFYMPKKATELKHLQCLEEELKPLEEVLNLAGDASIHDLISNINVIVLNLKGSETTFMCEYADETATIVEFLNRWITFSQSIISTLT

SEQ ID NO: 370 - protein, 129 aa, artificial sequence
  synthetic sequence
APASSSTKKTQLQLEHLLLDLQMILNGINNYKNPELEEMLTFKFYMPKKATELKHLQCLEEELKPLEEVLNLAGDASIHDLISNINVIVLELKGSETTFMCEYADETATIVEFLNRWITFSESIISTLT

SEQ ID NO: 371 - protein, 129 aa, artificial sequence
  synthetic sequence
APASSSTKKTQLQLEHLLLDLQMILNGINNYKNPELEEMLTFKFYMPKKATELKHLQCLEEELKPLEEVLNLAGDASIHDLISNINVIVLELKGSETTFMCEYADETATIVEFLNRWITFSDSIISTLT

SEQ ID NO: 372 - protein, 129 aa, artificial sequence
  synthetic sequence
APASSSTKKTQLQLEHLLLDLQMILNGINNYKNPELEEMLTFKFYMPKKATELKHLQCLEEELKPLEEVLNLAGDASIHDLISNINVIVLELKGSETTFMCEYADETATIVEFLNRWITFSASIISTLT

SEQ ID NO: 373 - protein, 129 aa, artificial sequence
  synthetic sequence
APASSSTKKTQLQLEHLLLDLQMILNGINNYKNPELEEMLTFKFYMPKKATELKHLQCLEEELKPLEEVLNLAGDASIHDLISNINVIVLELKGSETTFMCEYADETATIVEFLNRWITFSSSIISTLT

SEQ ID NO: 374 - protein, 129 aa, artificial sequence
  synthetic sequence
APASSSTKKTQLQLEHLLLDLQMILNGINNYKNPELEEMLTFKFYMPKKATELKHLQCLEEELKPLEEVLNLAGDASIHNLISNINVIVLQLKGSETTFMCEYADETATIVEFLNRWITFSQSIISTLT

SEQ ID NO: 375 - protein, 129 aa, artificial sequence
  synthetic sequence
APASSSTKKTQLQLEHLLLDLQMILNGINNYKNPELEEMLTFKFYMPKKATELKHLQCLEEELKPLEEVLNLAGDASIHELISNINVIVLQLKGSETTFMCEYADETATIVEFLNRWITFSQSIISTLT

SEQ ID NO: 376 - protein, 129 aa, artificial sequence
  synthetic sequence
APASSSTKKTQLQLEHLLLDLQMILNGINNYKNPELEEMLTFKFYMPKKATELKHLQCLEEELKPLEEVLNLAGDASIHTLISNINVIVLQLKGSETTFMCEYADETATIVEFLNRWITFSQSIISTLT

SEQ ID NO: 377 - protein, 129 aa, artificial sequence
  synthetic sequence
APASSSTKKTQLQLEHLLLDLQMILNGINNYKNPELEEMLTFKFYMPKKATELKHLQCLEEELKPLEEVLNLAGDASIHQLISNINVIVLQLKGSETTFMCEYADETATIVEFLNRWITFSQSIISTLT

SEQ ID NO: 378 - protein, 129 aa, artificial sequence
  synthetic sequence
APASSSTKKTQLQLETLLLDLQMILNGINNYKNPELEEMLTFKFYMPKKATELKHLQCLEEELKPLEEVLNLAGDASIHTLISNINVIVLELKGSETTFMCEYADETATIVEFLNRWITFSQSIISTLT

SEQ ID NO: 379 - protein, 129 aa, artificial sequence
  synthetic sequence
APASSSTKKTQLQLEHLLLDLQMILNGINNYKNPELEEMLTFKFYMPKKATELKHLQCLEEELKPLEEVLNLAGDASIHNLISNINIIVLELKGSETTFMCEYADETATIVEFLNRWITFSQSIISTLT

SEQ ID NO: 380 - protein, 129 aa, artificial sequence
  synthetic sequence
APASSSTKKTQLQLEHLLLDLQMILNGINNYKNPELEEMLTFKFYMPKKATELKHLQCLEEELKPLEEVLNLAGDASIHTLISNINVIVLELKGSETTFMCEYADETATIVEFLNRWITFSESIISTLT

SEQ ID NO: 381 - protein, 129 aa, artificial sequence
  synthetic sequence
APASSSTKKTQLQLEHLLLDLQMILNGINNYKNPELEEMLTFKFYMPKKATELKHLQCLEEELKPLEEVLNLAGDASIHNLISNINVIVLELKGSETTFMCEYADETATIVEFLNRWITFSESIISTLT

SEQ ID NO: 382 - protein, 129 aa, artificial sequence
  synthetic sequence
APASSSTKKTQLQLETLLLDLQMILNGINNYKNPELEEMLTFKFYMPKKATELKHLQCLEEELKPLEEVLNLAGDASIHQLISNINVIVLELKGSETTFMCEYADETATIVEFLNRWITFSQSIISTLT

SEQ ID NO: 383 - protein, 129 aa, artificial sequence
  synthetic sequence
APASSSTKKTQLQLETLLLDLQMILNGINNYKNPELEEMLTFKFYMPKKATELKHLQCLEEELKPLEEVLNLAGDASIHDLISNINIIVLELKGSETTFMCEYADETATIVEFLNRWITFSQSIISTLT

SEQ ID NO: 384 - protein, 129 aa, artificial sequence; identical to SEQ ID NO: 33
  synthetic sequence

SEQ ID NO: 385 - protein, 129 aa, artificial sequence
  synthetic sequence
APASSSTKKTQRQLEHLLLDLQMILNGINNYKNPELEEMLTFKFYMPKKATELKHLQCLEEELKPLEEVLNLAQSKNFHDLISNINVIVLELKGSETTFMCEYADETATIVEFLNRWITFSQSIISTLT

SEQ ID NO: 386 - protein, 129 aa, artificial sequence
  synthetic sequence
APASSSTKKTQKQLEHLLLDLQMILNGINNYKNPELEEMLTFKFYMPKKATELKHLQCLEEELKPLEEVLNLAQSKNFHDLISNINVIVLELKGSETTFMCEYADETATIVEFLNRWITFSQSIISTLT

SEQ ID NO: 387 - protein, 129 aa, artificial sequence
  synthetic sequence
APASSSTKKTQEQLEHLLLDLQMILNGINNYKNPELEEMLTFKFYMPKKATELKHLQCLEEELKPLEEVLNLAQSKNFHDLISNINVIVLELKGSETTFMCEYADETATIVEFLNRWITFSQSIISTLT

SEQ ID NO: 388 - protein, 129 aa, artificial sequence
  synthetic sequence
APASSSTKKTQQQLEHLLLDLQMILNGINNYKNPELEEMLTFKFYMPKKATELKHLQCLEEELKPLEEVLNLAQSKNFHDLISNINVIVLELKGSETTFMCEYADETATIVEFLNRWITFSQSIISTLT

SEQ ID NO: 389 - protein, 129 aa, artificial sequence
  synthetic sequence
APASSSTKKTQLQLQHLLLDLQMILNGINNYKNPELEEMLTFKFYMPKKATELKHLQCLEEELKPLEEVLNLAQSKNFHDLISNINVIVLELKGSETTFMCEYADETATIVEFLNRWITFSQSIISTLT

SEQ ID NO: 390 - protein, 129 aa, artificial sequence
  synthetic sequence
APASSSTKKTQLQLRHLLLDLQMILNGINNYKNPELEEMLTFKFYMPKKATELKHLQCLEEELKPLEEVLNLAQSKNFHDLISNINVIVLELKGSETTFMCEYADETATIVEFLNRWITFSQSIISTLT

SEQ ID NO: 391 - protein, 129 aa, artificial sequence
  synthetic sequence
APASSSTKKTQLQLAHLLLDLQMILNGINNYKNPELEEMLTFKFYMPKKATELKHLQCLEEELKPLEEVLNLAQSKNFHDLISNINVIVLELKGSETTFMCEYADETATIVEFLNRWITFSQSIISTLT

SEQ ID NO: 392 - protein, 129 aa, artificial sequence
  synthetic sequence
APASSSTKKTQLQLSHLLLDLQMILNGINNYKNPELEEMLTFKFYMPKKATELKHLQCLEEELKPLEEVLNLAQSKNFHDLISNINVIVLELKGSETTFMCEYADETATIVEFLNRWITFSQSIISTLT

SEQ ID NO: 393 - protein, 129 aa, artificial sequence
  synthetic sequence
APASSSTKKTQLQLENLLLDLQMILNGINNYKNPELEEMLTFKFYMPKKATELKHLQCLEEELKPLEEVLNLAQSKNFHDLISNINVIVLELKGSETTFMCEYADETATIVEFLNRWITFSQSIISTLT

SEQ ID NO: 394 - protein, 129 aa, artificial sequence
  synthetic sequence
APASSSTKKTQLQLETLLLDLQMILNGINNYKNPELEEMLTFKFYMPKKATELKHLQCLEEELKPLEEVLNLAQSKNFHDLISNINVIVLELKGSETTFMCEYADETATIVEFLNRWITFSQSIISTLT

SEQ ID NO: 395 - protein, 129 aa, artificial sequence
  synthetic sequence
APASSSTKKTQLQLEYLLLDLQMILNGINNYKNPELEEMLTFKFYMPKKATELKHLQCLEEELKPLEEVLNLAQSKNFHDLISNINVIVLELKGSETTFMCEYADETATIVEFLNRWITFSQSIISTLT

SEQ ID NO: 396 - protein, 129 aa, artificial sequence
  synthetic sequence
APASSSTKKTQLQLEALLLDLQMILNGINNYKNPELEEMLTFKFYMPKKATELKHLQCLEEELKPLEEVLNLAQSKNFHDLISNINVIVLELKGSETTFMCEYADETATIVEFLNRWITFSQSIISTLT

SEQ ID NO: 397 - protein, 129 aa, artificial sequence
  synthetic sequence
APASSSTKKTQLQLEELLLDLQMILNGINNYKNPELEEMLTFKFYMPKKATELKHLQCLEEELKPLEEVLNLAQSKNFHDLISNINVIVLELKGSETTFMCEYADETATIVEFLNRWITFSQSIISTLT

SEQ ID NO: 398 - protein, 129 aa, artificial sequence
  synthetic sequence
APASSSTKKTQLQLEDLLLDLQMILNGINNYKNPELEEMLTFKFYMPKKATELKHLQCLEEELKPLEEVLNLAQSKNFHDLISNINVIVLELKGSETTFMCEYADETATIVEFLNRWITFSQSIISTLT

SEQ ID NO: 399 - protein, 129 aa, artificial sequence
  synthetic sequence
APASSSTKKTQLQLERLLLDLQMILNGINNYKNPELEEMLTFKFYMPKKATELKHLQCLEEELKPLEEVLNLAQSKNFHDLISNINVIVLELKGSETTFMCEYADETATIVEFLNRWITFSQSIISTLT

SEQ ID NO: 400 - protein, 129 aa, artificial sequence
  synthetic sequence
APASSSTKKTQLQLEHLLDDLQMILNGINNYKNPELEEMLTFKFYMPKKATELKHLQCLEEELKPLEEVLNLAQSKNFHDLISNINVIVDELKGSETTFMCEYADETATIVEFLNRWITFSQSIISTLT

SEQ ID NO: 401 - protein, 129 aa, artificial sequence
  synthetic sequence
APASSSTKKTQLQLEHLLEDLQMILNGINNYKNPELEEMLTFKFYMPKKATELKHLQCLEEELKPLEEVLNLAQSKNFHDLISNINVIVEELKGSETTFMCEYADETATIVEFLNRWITFSQSIISTLT

SEQ ID NO: 402 - protein, 129 aa, artificial sequence
  synthetic sequence
APASSSTKKTQLQLEHLLRDLQMILNGINNYKNPELEEMLTFKFYMPKKATELKHLQCLEEELKPLEEVLNLAQSKNFHDLISNINVIVRELKGSETTFMCEYADETATIVEFLNRWITFSQSIISTLT

SEQ ID NO: 403 - protein, 129 aa, artificial sequence
  synthetic sequence
APASSSTKKTQLQLEHLLSDLQMILNGINNYKNPELEEMLTFKFYMPKKATELKHLQCLEEELKPLEEVLNLAQSKNFHDLISNINVIVSELKGSETTFMCEYADETATIVEFLNRWITFSQSIISTLT

SEQ ID NO: 404 - protein, 129 aa, artificial sequence
  synthetic sequence
APASSSTKKTQLQLEHLLLNLQMILNGINNYKNPELEEMLTFKFYMPKKATELKHLQCLEEELKPLEEVLNLAQSKNFHDLISNINVIVLELKGSETTFMCEYADETATIVEFLNRWITFSQSIISTLT

SEQ ID NO: 405 - protein, 129 aa, artificial sequence
  synthetic sequence
APASSSTKKTQLQLEHLLLQLQMILNGINNYKNPELEEMLTFKFYMPKKATELKHLQCLEEELKPLEEVLNLAQSKNFHDLISNINVIVLELKGSETTFMCEYADETATIVEFLNRWITFSQSIISTLT

SEQ ID NO: 406 - protein, 129 aa, artificial sequence
  synthetic sequence
APASSSTKKTQLQLEHLLLELQMILNGINNYKNPELEEMLTFKFYMPKKATELKHLQCLEEELKPLEEVLNLAQSKNFHDLISNINVIVLELKGSETTFMCEYADETATIVEFLNRWITFSQSIISTLT

SEQ ID NO: 407 - protein, 129 aa, artificial sequence
  synthetic sequence
APASSSTKKTQLQLEHLLLALQMILNGINNYKNPELEEMLTFKFYMPKKATELKHLQCLEEELKPLEEVLNLAQSKNFHDLISNINVIVLELKGSETTFMCEYADETATIVEFLNRWITFSQSIISTLT

SEQ ID NO: 408 - protein, 129 aa, artificial sequence
  synthetic sequence
APASSSTKKTQLQLEHLLLRLQMILNGINNYKNPELEEMLTFKFYMPKKATELKHLQCLEEELKPLEEVLNLAQSKNFHDLISNINVIVLELKGSETTFMCEYADETATIVEFLNRWITFSQSIISTLT

SEQ ID NO: 409 - protein, 129 aa, artificial sequence
  synthetic sequence
APASSSTKKTQLQLEHLLLSLQMILNGINNYKNPELEEMLTFKFYMPKKATELKHLQCLEEELKPLEEVLNLAQSKNFHDLISNINVIVLELKGSETTFMCEYADETATIVEFLNRWITFSQSIISTLT

SEQ ID NO: 410 - protein, 129 aa, artificial sequence
  synthetic sequence
APASSSTKKTQLQLEHLLLDLQMILNGINNYKNPELEEMLTFKFYMPKKATELKHLQCLEEELKPLEEVLNLAQSKNFHNLISNINVIVLELKGSETTFMCEYADETATIVEFLNRWITFSQSIISTLT

SEQ ID NO: 411 - protein, 129 aa, artificial sequence
  synthetic sequence
APASSSTKKTQLQLEHLLLDLQMILNGINNYKNPELEEMLTFKFYMPKKATELKHLQCLEEELKPLEEVLNLAQSKNFHELISNINVIVLELKGSETTFMCEYADETATIVEFLNRWITFSQSIISTLT

SEQ ID NO: 412 - protein, 129 aa, artificial sequence
  synthetic sequence
APASSSTKKTQLQLEHLLLDLQMILNGINNYKNPELEEMLTFKFYMPKKATELKHLQCLEEELKPLEEVLNLAQSKNFHQLISNINVIVLELKGSETTFMCEYADETATIVEFLNRWITFSQSIISTLT

SEQ ID NO: 413 - protein, 129 aa, artificial sequence
  synthetic sequence
APASSSTKKTQLQLEHLLLDLQMILNGINNYKNPELEEMLTFKFYMPKKATELKHLQCLEEELKPLEEVLNLAQSKNFHTLISNINVIVLELKGSETTFMCEYADETATIVEFLNRWITFSQSIISTLT

SEQ ID NO: 414 - protein, 129 aa, artificial sequence
  synthetic sequence
APASSSTKKTQLQLEHLLLDLQMILNGINNYKNPELEEMLTFKFYMPKKATELKHLQCLEEELKPLEEVLNLAQSKNFHSLISNINVIVLELKGSETTFMCEYADETATIVEFLNRWITFSQSIISTLT

SEQ ID NO: 415 - protein, 129 aa, artificial sequence
  synthetic sequence
APASSSTKKTQLQLEHLLLDLQMILNGINNYKNPELEEMLTFKFYMPKKATELKHLQCLEEELKPLEEVLNLAQSKNFHRLISNINVIVLELKGSETTFMCEYADETATIVEFLNRWITFSQSIISTLT

SEQ ID NO: 416 - protein, 129 aa, artificial sequence
  synthetic sequence
APASSSTKKTQLQLEHLLLDLQMILNGINNYKNPELEEMLTFKFYMPKKATELKHLQCLEEELKPLEEVLNLAQSKNFHGLISNINVIVLELKGSETTFMCEYADETATIVEFLNRWITFSQSIISTLT

SEQ ID NO: 417 - protein, 129 aa, artificial sequence
  synthetic sequence
APASSSTKKTQLQLEHLLLDLQMILNGINNYKNPELEEMLTFKFYMPKKATELKHLQCLEEELKPLEEVLNLAQSKNFHMLISNINVIVLELKGSETTFMCEYADETATIVEFLNRWITFSQSIISTLT

SEQ ID NO: 418 - protein, 129 aa, artificial sequence
  synthetic sequence
APASSSTKKTQLQLEHLLLDLQMILNGINNYKNPELEEMLTFKFYMPKKATELKHLQCLEEELKPLEEVLNLAQSKNFHFLISNINVIVLELKGSETTFMCEYADETATIVEFLNRWITFSQSIISTLT

SEQ ID NO: 419 - protein, 129 aa, artificial sequence
  synthetic sequence
APASSSTKKTQLQLEHLLLDLQMILNGINNYKNPELEEMLTFKFYMPKKATELKHLQCLEEELKPLEEVLNLAQSKNFHLLISNINVIVLELKGSETTFMCEYADETATIVEFLNRWITFSQSIISTLT

SEQ ID NO: 420 - protein, 129 aa, artificial sequence
  synthetic sequence
APASSSTKKTQLQLEHLLLDLQMILNGINNYKNPELEEMLTFKFYMPKKATELKHLQCLEEELKPLEEVLNLAQSKNFHKLISNINVIVLELKGSETTFMCEYADETATIVEFLNRWITFSQSIISTLT

SEQ ID NO: 421 - protein, 129 aa, artificial sequence
  synthetic sequence
APASSSTKKTQLQLEHLLLDLQMILNGINNYKNPELEEMLTFKFYMPKKATELKHLQCLEEELKPLEEVLNLAQSKNFHHLISNINVIVLELKGSETTFMCEYADETATIVEFLNRWITFSQSIISTLT

SEQ ID NO: 422 - protein, 129 aa, artificial sequence
  synthetic sequence
APASSSTKKTQLQLEHLLLDLQMILNGINNYKNPELEEMLTFKFYMPKKATELKHLQCLEEELKPLEEVLNLAQSKNFHDLITNINVIVLELKGSETTFMCEYADETATIVEFLNRWITFSQSIISTLT

SEQ ID NO: 423 - protein, 129 aa, artificial sequence
  synthetic sequence
APASSSTKKTQLQLEHLLLDLQMILNGINNYKNPELEEMLTFKFYMPKKATELKHLQCLEEELKPLEEVLNLAQSKNFHDLIRNINVIVLELKGSETTFMCEYADETATIVEFLNRWITFSQSIISTLT

SEQ ID NO: 424 - protein, 129 aa, artificial sequence
  synthetic sequence
APASSSTKKTQLQLEHLLLDLQMILNGINNYKNPELEEMLTFKFYMPKKATELKHLQCLEEELKPLEEVLNLAQSKNFHDLIKNINVIVLELKGSETTFMCEYADETATIVEFLNRWITFSQSIISTLT

SEQ ID NO: 425 - protein, 129 aa, artificial sequence
  synthetic sequence
APASSSTKKTQLQLEHLLLDLQMILNGINNYKNPELEEMLTFKFYMPKKATELKHLQCLEEELKPLEEVLNLAQSKNFHDLILNINVIVLELKGSETTFMCEYADETATIVEFLNRWITFSQSIISTLT

SEQ ID NO: 426 - protein, 129 aa, artificial sequence
  synthetic sequence
APASSSTKKTQLQLEHLLLDLQMILNGINNYKNPELEEMLTFKFYMPKKATELKHLQCLEEELKPLEEVLNLAQSKNFHDLIMNINVIVLELKGSETTFMCEYADETATIVEFLNRWITFSQSIISTLT

SEQ ID NO: 427 - protein, 129 aa, artificial sequence
  synthetic sequence
APASSSTKKTQLQLEHLLLDLQMILNGINNYKNPELEEMLTFKFYMPKKATELKHLQCLEEELKPLEEVLNLAQSKNFHDLIHNINVIVLELKGSETTFMCEYADETATIVEFLNRWITFSQSIISTLT

SEQ ID NO: 428 - protein, 129 aa, artificial sequence
  synthetic sequence
APASSSTKKTQLQLEHLLLDLQMILNGINNYKNPELEEMLTFKFYMPKKATELKHLQCLEEELKPLEEVLNLAQSKNFHDLISDINVIVLELKGSETTFMCEYADETATIVEFLNRWITFSQSIISTLT

SEQ ID NO: 429 - protein, 129 aa, artificial sequence
  synthetic sequence
APASSSTKKTQLQLEHLLLDLQMILNGINNYKNPELEEMLTFKFYMPKKATELKHLQCLEEELKPLEEVLNLAQSKNFHDLISTINVIVLELKGSETTFMCEYADETATIVEFLNRWITFSQSIISTLT

SEQ ID NO: 430 - protein, 129 aa, artificial sequence
  synthetic sequence
APASSSTKKTQLQLEHLLLDLQMILNGINNYKNPELEEMLTFKFYMPKKATELKHLQCLEEELKPLEEVLNLAQSKNFHDLISQINVIVLELKGSETTFMCEYADETATIVEFLNRWITFSQSIISTLT

SEQ ID NO: 431 - protein, 129 aa, artificial sequence
  synthetic sequence
APASSSTKKTQLQLEHLLLDLQMILNGINNYKNPELEEMLTFKFYMPKKATELKHLQCLEEELKPLEEVLNLAQSKNFHDLISRINVIVLELKGSETTFMCEYADETATIVEFLNRWITFSQSIISTLT

SEQ ID NO: 432 - protein, 129 aa, artificial sequence
  synthetic sequence
APASSSTKKTQLQLEHLLLDLQMILNGINNYKNPELEEMLTFKFYMPKKATELKHLQCLEEELKPLEEVLNLAQSKNFHDLISEINVIVLELKGSETTFMCEYADETATIVEFLNRWITFSQSIISTLT

SEQ ID NO: 433 - protein, 129 aa, artificial sequence
  synthetic sequence
APASSSTKKTQLQLEHLLLDLQMILNGINNYKNPELEEMLTFKFYMPKKATELKHLQCLEEELKPLEEVLNLAQSKNFHDLISKINVIVLELKGSETTFMCEYADETATIVEFLNRWITFSQSIISTLT

SEQ ID NO: 434 - protein, 129 aa, artificial sequence
  synthetic sequence
APASSSTKKTQLQLEHLLLDLQMILNGINNYKNPELEEMLTFKFYMPKKATELKHLQCLEEELKPLEEVLNLAQSKNFHDLISHINVIVLELKGSETTFMCEYADETATIVEFLNRWITFSQSIISTLT

SEQ ID NO: 435 - protein, 129 aa, artificial sequence
  synthetic sequence
APASSSTKKTQLQLEHLLLDLQMILNGINNYKNPELEEMLTFKFYMPKKATELKHLQCLEEELKPLEEVLNLAQSKNFHDLISMINVIVLELKGSETTFMCEYADETATIVEFLNRWITFSQSIISTLT

SEQ ID NO: 436 - protein, 129 aa, artificial sequence
  synthetic sequence
APASSSTKKTQLQLEHLLLDLQMILNGINNYKNPELEEMLTFKFYMPKKATELKHLQCLEEELKPLEEVLNLAQSKNFHDLISSINVIVLELKGSETTFMCEYADETATIVEFLNRWITFSQSIISTLT

SEQ ID NO: 437 - protein, 129 aa, artificial sequence
  synthetic sequence
APASSSTKKTQLQLEHLLLDLQMILNGINNYKNPELEEMLTFKFYMPKKATELKHLQCLEEELKPLEEVLNLAQSKNFHDLISLINVIVLELKGSETTFMCEYADETATIVEFLNRWITFSQSIISTLT

SEQ ID NO: 438 - protein, 129 aa, artificial sequence
  synthetic sequence
APASSSTKKTQLQLEHLLLDLQMILNGINNYKNPELEEMLTFKFYMPKKATELKHLQCLEEELKPLEEVLNLAQSKNFHDLISNINIIVLELKGSETTFMCEYADETATIVEFLNRWITFSQSIISTLT

SEQ ID NO: 439 - protein, 129 aa, artificial sequence
  synthetic sequence
APASSSTKKTQLQLEHLLLDLQMILNGINNYKNPELEEMLTFKFYMPKKATELKHLQCLEEELKPLEEVLNLAQSKNFHDLISNINLIVLELKGSETTFMCEYADETATIVEFLNRWITFSQSIISTLT

SEQ ID NO: 440 - protein, 129 aa, artificial sequence
  synthetic sequence
APASSSTKKTQLQLEHLLLDLQMILNGINNYKNPELEEMLTFKFYMPKKATELKHLQCLEEELKPLEEVLNLAQSKNFHDLISNINDIVLELKGSETTFMCEYADETATIVEFLNRWITFSQSIISTLT

SEQ ID NO: 441 - protein, 129 aa, artificial sequence
  synthetic sequence
APASSSTKKTQLQLEHLLLDLQMILNGINNYKNPELEEMLTFKFYMPKKATELKHLQCLEEELKPLEEVLNLAQSKNFHDLISNINEIVLELKGSETTFMCEYADETATIVEFLNRWITFSQSIISTLT

SEQ ID NO: 442 - protein, 129 aa, artificial sequence
  synthetic sequence
APASSSTKKTQLQLEHLLLDLQMILNGINNYKNPELEEMLTFKFYMPKKATELKHLQCLEEELKPLEEVLNLAQSKNFHDLISNINNIVLELKGSETTFMCEYADETATIVEFLNRWITFSQSIISTLT

SEQ ID NO: 443 - protein, 129 aa, artificial sequence
  synthetic sequence
APASSSTKKTQLQLEHLLLDLQMILNGINNYKNPELEEMLTFKFYMPKKATELKHLQCLEEELKPLEEVLNLAQSKNFHDLISNINQIVLELKGSETTFMCEYADETATIVEFLNRWITFSQSIISTLT

SEQ ID NO: 444 - protein, 129 aa, artificial sequence
  synthetic sequence
APASSSTKKTQLQLEHLLLDLQMILNGINNYKNPELEEMLTFKFYMPKKATELKHLQCLEEELKPLEEVLNLAQSKNFHDLISNINSIVLELKGSETTFMCEYADETATIVEFLNRWITFSQSIISTLT

SEQ ID NO: 445 - protein, 129 aa, artificial sequence
  synthetic sequence
APASSSTKKTQLQLEHLLLDLQMILNGINNYKNPELEEMLTFKFYMPKKATELKHLQCLEEELKPLEEVLNLAQSKNFHDLISNINHIVLELKGSETTFMCEYADETATIVEFLNRWITFSQSIISTLT

SEQ ID NO: 446 - protein, 129 aa, artificial sequence
  synthetic sequence
APASSSTKKTQLQLEHLLLDLQMILNGINNYKNPELEEMLTFKFYMPKKATELKHLQCLEEELKPLEEVLNLAQSKNFHDLISNINVEVLELKGSETTFMCEYADETATIVEFLNRWITFSQSIISTLT

SEQ ID NO: 447 - protein, 129 aa, artificial sequence
  synthetic sequence
APASSSTKKTQLQLEHLLLDLQMILNGINNYKNPELEEMLTFKFYMPKKATELKHLQCLEEELKPLEEVLNLAQSKNFHDLISNINVTVLELKGSETTFMCEYADETATIVEFLNRWITFSQSIISTLT

SEQ ID NO: 448 - protein, 129 aa, artificial sequence
  synthetic sequence
APASSSTKKTQLQLEHLLLDLQMILNGINNYKNPELEEMLTFKFYMPKKATELKHLQCLEEELKPLEEVLNLAQSKNFHDLISNINVKVLELKGSETTFMCEYADETATIVEFLNRWITFSQSIISTLT

SEQ ID NO: 449 - protein, 129 aa, artificial sequence
  synthetic sequence
APASSSTKKTQLQLEHLLLDLQMILNGINNYKNPELEEMLTFKFYMPKKATELKHLQCLEEELKPLEEVLNLAQSKNFHDLISNINVRVLELKGSETTFMCEYADETATIVEFLNRWITFSQSIISTLT

SEQ ID NO: 450 - protein, 129 aa, artificial sequence
  synthetic sequence
APASSSTKKTQLQLEHLLLDLQMILNGINNYKNPELEEMLTFKFYMPKKATELKHLQCLEEELKPLEEVLNLAQSKNFHDLISNINVLVLELKGSETTFMCEYADETATIVEFLNRWITFSQSIISTLT

SEQ ID NO: 451 - protein, 129 aa, artificial sequence
  synthetic sequence
APASSSTKKTQLQLEHLLLDLQMILNGINNYKNPELEEMLTFKFYMPKKATELKHLQCLEEELKPLEEVLNLAQSKNFHDLISNINVIVLQLKGSETTFMCEYADETATIVEFLNRWITFSQSIISTLT

SEQ ID NO: 452 - protein, 129 aa, artificial sequence
  synthetic sequence
APASSSTKKTQLQLEHLLLDLQMILNGINNYKNPELEEMLTFKFYMPKKATELKHLQCLEEELKPLEEVLNLAQSKNFHDLISNINVIVLGLKGSETTFMCEYADETATIVEFLNRWITFSQSIISTLT

SEQ ID NO: 453 - protein, 129 aa, artificial sequence
  synthetic sequence
APASSSTKKTQLQLEHLLLDLQMILNGINNYKNPELEEMLTFKFYMPKKATELKHLQCLEEELKPLEEVLNLAQSKNFHDLISNINVIVLDLKGSETTFMCEYADETATIVEFLNRWITFSQSIISTLT

SEQ ID NO: 454 - protein, 129 aa, artificial sequence
  synthetic sequence
APASSSTKKTQLQLEHLLLDLQMILNGINNYKNPELEEMLTFKFYMPKKATELKHLQCLEEELKPLEEVLNLAQSKNFHDLISNINVIVLNLKGSETTFMCEYADETATIVEFLNRWITFSQSIISTLT

SEQ ID NO: 455 - protein, 129 aa, artificial sequence
  synthetic sequence
APASSSTKKTQLQLEHLLLDLQMILNGINNYKNPELEEMLTFKFYMPKKATELKHLQCLEEELKPLEEVLNLAQSKNFHDLISNINVIVLELKGSETTFMCEYADETATIVEFLNRWITFSESIISTLT

SEQ ID NO: 456 - protein, 129 aa, artificial sequence
  synthetic sequence
APASSSTKKTQLQLEHLLLDLQMILNGINNYKNPELEEMLTFKFYMPKKATELKHLQCLEEELKPLEEVLNLAQSKNFHDLISNINVIVLELKGSETTFMCEYADETATIVEFLNRWITFSDSIISTLT

SEQ ID NO: 457 - protein, 129 aa, artificial sequence
  synthetic sequence
APASSSTKKTQLQLEHLLLDLQMILNGINNYKNPELEEMLTFKFYMPKKATELKHLQCLEEELKPLEEVLNLAQSKNFHDLISNINVIVLELKGSETTFMCEYADETATIVEFLNRWITFSASIISTLT

SEQ ID NO: 458 - protein, 129 aa, artificial sequence
  synthetic sequence
APASSSTKKTQLQLEHLLLDLQMILNGINNYKNPELEEMLTFKFYMPKKATELKHLQCLEEELKPLEEVLNLAQSKNFHDLISNINVIVLELKGSETTFMCEYADETATIVEFLNRWITFSSSIISTLT

SEQ ID NO: 459 - protein, 129 aa, artificial sequence
  synthetic sequence
APASSSTKKTQLQLEHLLLDLQMILNGINNYKNPELEEMLTFKFYMPKKATELKHLQCLEEELKPLEEVLNLAQSKNFHNLISNINVIVLQLKGSETTFMCEYADETATIVEFLNRWITFSQSIISTLT

SEQ ID NO: 460 - protein, 129 aa, artificial sequence
  synthetic sequence
APASSSTKKTQLQLEHLLLDLQMILNGINNYKNPELEEMLTFKFYMPKKATELKHLQCLEEELKPLEEVLNLAQSKNFHELISNINVIVLQLKGSETTFMCEYADETATIVEFLNRWITFSQSIISTLT

SEQ ID NO: 461 - protein, 129 aa, artificial sequence
  synthetic sequence
APASSSTKKTQLQLEHLLLDLQMILNGINNYKNPELEEMLTFKFYMPKKATELKHLQCLEEELKPLEEVLNLAQSKNFHTLISNINVIVLQLKGSETTFMCEYADETATIVEFLNRWITFSQSIISTLT

SEQ ID NO: 462 - protein, 129 aa, artificial sequence
  synthetic sequence
APASSSTKKTQLQLEHLLLDLQMILNGINNYKNPELEEMLTFKFYMPKKATELKHLQCLEEELKPLEEVLNLAQSKNFHQLISNINVIVLQLKGSETTFMCEYADETATIVEFLNRWITFSQSIISTLT

SEQ ID NO: 463 - protein, 129 aa, artificial sequence
  synthetic sequence
APASSSTKKTQLQLETLLLDLQMILNGINNYKNPELEEMLTFKFYMPKKATELKHLQCLEEELKPLEEVLNLAQSKNFHTLISNINVIVLELKGSETTFMCEYADETATIVEFLNRWITFSQSIISTLT

SEQ ID NO: 464 - protein, 129 aa, artificial sequence
  synthetic sequence
APASSSTKKTQLQLEHLLLDLQMILNGINNYKNPELEEMLTFKFYMPKKATELKHLQCLEEELKPLEEVLNLAQSKNFHNLISNINIIVLELKGSETTFMCEYADETATIVEFLNRWITFSQSIISTLT

SEQ ID NO: 465 - protein, 129 aa, artificial sequence
  synthetic sequence
APASSSTKKTQLQLEHLLLDLQMILNGINNYKNPELEEMLTFKFYMPKKATELKHLQCLEEELKPLEEVLNLAQSKNFHTLISNINVIVLELKGSETTFMCEYADETATIVEFLNRWITFSESIISTLT

SEQ ID NO: 466 - protein, 129 aa, artificial sequence
  synthetic sequence
APASSSTKKTQLQLEHLLLDLQMILNGINNYKNPELEEMLTFKFYMPKKATELKHLQCLEEELKPLEEVLNLAQSKNFHNLISNINVIVLELKGSETTFMCEYADETATIVEFLNRWITFSESIISTLT

SEQ ID NO: 467 - protein, 129 aa, artificial sequence
  synthetic sequence
APASSSTKKTQLQLETLLLDLQMILNGINNYKNPELEEMLTFKFYMPKKATELKHLQCLEEELKPLEEVLNLAQSKNFHQLISNINVIVLELKGSETTFMCEYADETATIVEFLNRWITFSQSIISTLT

SEQ ID NO: 468 - protein, 129 aa, artificial sequence
  synthetic sequence
APASSSTKKTQLQLETLLLDLQMILNGINNYKNPELEEMLTFKFYMPKKATELKHLQCLEEELKPLEEVLNLAQSKNFHDLISNINIIVLELKGSETTFMCEYADETATIVEFLNRWITFSQSIISTLT

SEQ ID NO: 469 - protein, 129 aa, artificial sequence; identical to SEQ ID NO: 34
  synthetic sequence

SEQ ID NO: 470 - protein, 129 aa, artificial sequence
  synthetic sequence
APASSSTKKTQRQLEHLLLDLQMILNGINNYKNPKLTRMLTFKFYMPKKATELKHLQCLEEELKPLEEVLNLAGDASIHDLISNINVIVLELKGSETTFMCEYADETATIVEFLNRWITFSQSIISTLT

SEQ ID NO: 471 - protein, 129 aa, artificial sequence
  synthetic sequence
APASSSTKKTQKQLEHLLLDLQMILNGINNYKNPKLTRMLTFKFYMPKKATELKHLQCLEEELKPLEEVLNLAGDASIHDLISNINVIVLELKGSETTFMCEYADETATIVEFLNRWITFSQSIISTLT

SEQ ID NO: 472 - protein, 129 aa, artificial sequence
  synthetic sequence
APASSSTKKTQEQLEHLLLDLQMILNGINNYKNPKLTRMLTFKFYMPKKATELKHLQCLEEELKPLEEVLNLAGDASIHDLISNINVIVLELKGSETTFMCEYADETATIVEFLNRWITFSQSIISTLT

SEQ ID NO: 473 - protein, 129 aa, artificial sequence
  synthetic sequence
APASSSTKKTQQQLEHLLLDLQMILNGINNYKNPKLTRMLTFKFYMPKKATELKHLQCLEEELKPLEEVLNLAGDASIHDLISNINVIVLELKGSETTFMCEYADETATIVEFLNRWITFSQSIISTLT

SEQ ID NO: 474 - protein, 129 aa, artificial sequence
  synthetic sequence
APASSSTKKTQLQLQHLLLDLQMILNGINNYKNPKLTRMLTFKFYMPKKATELKHLQCLEEELKPLEEVLNLAGDASIHDLISNINVIVLELKGSETTFMCEYADETATIVEFLNRWITFSQSIISTLT

SEQ ID NO: 475 - protein, 129 aa, artificial sequence
  synthetic sequence
APASSSTKKTQLQLRHLLLDLQMILNGINNYKNPKLTRMLTFKFYMPKKATELKHLQCLEEELKPLEEVLNLAGDASIHDLISNINVIVLELKGSETTFMCEYADETATIVEFLNRWITFSQSIISTLT

SEQ ID NO: 476 - protein, 129 aa, artificial sequence
  synthetic sequence
APASSSTKKTQLQLAHLLLDLQMILNGINNYKNPKLTRMLTFKFYMPKKATELKHLQCLEEELKPLEEVLNLAGDASIHDLISNINVIVLELKGSETTFMCEYADETATIVEFLNRWITFSQSIISTLT

SEQ ID NO: 477 - protein, 129 aa, artificial sequence
  synthetic sequence
APASSSTKKTQLQLSHLLLDLQMILNGINNYKNPKLTRMLTFKFYMPKKATELKHLQCLEEELKPLEEVLNLAGDASIHDLISNINVIVLELKGSETTFMCEYADETATIVEFLNRWITFSQSIISTLT

SEQ ID NO: 478 - protein, 129 aa, artificial sequence
  synthetic sequence
APASSSTKKTQLQLENLLLDLQMILNGINNYKNPKLTRMLTFKFYMPKKATELKHLQCLEEELKPLEEVLNLAGDASIHDLISNINVIVLELKGSETTFMCEYADETATIVEFLNRWITFSQSIISTLT

SEQ ID NO: 479 - protein, 129 aa, artificial sequence
  synthetic sequence
APASSSTKKTQLQLETLLLDLQMILNGINNYKNPKLTRMLTFKFYMPKKATELKHLQCLEEELKPLEEVLNLAGDASIHDLISNINVIVLELKGSETTFMCEYADETATIVEFLNRWITFSQSIISTLT

SEQ ID NO: 480 - protein, 129 aa, artificial sequence
  synthetic sequence
APASSSTKKTQLQLEYLLLDLQMILNGINNYKNPKLTRMLTFKFYMPKKATELKHLQCLEEELKPLEEVLNLAGDASIHDLISNINVIVLELKGSETTFMCEYADETATIVEFLNRWITFSQSIISTLT

SEQ ID NO: 481 - protein, 129 aa, artificial sequence
  synthetic sequence
APASSSTKKTQLQLEALLLDLQMILNGINNYKNPKLTRMLTFKFYMPKKATELKHLQCLEEELKPLEEVLNLAGDASIHDLISNINVIVLELKGSETTFMCEYADETATIVEFLNRWITFSQSIISTLT

SEQ ID NO: 482 - protein, 129 aa, artificial sequence
  synthetic sequence
APASSSTKKTQLQLEELLLDLQMILNGINNYKNPKLTRMLTFKFYMPKKATELKHLQCLEEELKPLEEVLNLAGDASIHDLISNINVIVLELKGSETTFMCEYADETATIVEFLNRWITFSQSIISTLT

SEQ ID NO: 483 - protein, 129 aa, artificial sequence
  synthetic sequence
APASSSTKKTQLQLEDLLLDLQMILNGINNYKNPKLTRMLTFKFYMPKKATELKHLQCLEEELKPLEEVLNLAGDASIHDLISNINVIVLELKGSETTFMCEYADETATIVEFLNRWITFSQSIISTLT

SEQ ID NO: 484 - protein, 129 aa, artificial sequence
  synthetic sequence
APASSSTKKTQLQLERLLLDLQMILNGINNYKNPKLTRMLTFKFYMPKKATELKHLQCLEEELKPLEEVLNLAGDASIHDLISNINVIVLELKGSETTFMCEYADETATIVEFLNRWITFSQSIISTLT

SEQ ID NO: 485 - protein, 129 aa, artificial sequence
  synthetic sequence
APASSSTKKTQLQLEHLLDDLQMILNGINNYKNPKLTRMLTFKFYMPKKATELKHLQCLEEELKPLEEVLNLAGDASIHDLISNINVIVDELKGSETTFMCEYADETATIVEFLNRWITFSQSIISTLT

SEQ ID NO: 486 - protein, 129 aa, artificial sequence
  synthetic sequence
APASSSTKKTQLQLEHLLEDLQMILNGINNYKNPKLTRMLTFKFYMPKKATELKHLQCLEEELKPLEEVLNLAGDASIHDLISNINVIVEELKGSETTFMCEYADETATIVEFLNRWITFSQSIISTLT

SEQ ID NO: 487 - protein, 129 aa, artificial sequence
  synthetic sequence
APASSSTKKTQLQLEHLLRDLQMILNGINNYKNPKLTRMLTFKFYMPKKATELKHLQCLEEELKPLEEVLNLAGDASIHDLISNINVIVRELKGSETTFMCEYADETATIVEFLNRWITFSQSIISTLT

SEQ ID NO: 488 - protein, 129 aa, artificial sequence
  synthetic sequence
APASSSTKKTQLQLEHLLSDLQMILNGINNYKNPKLTRMLTFKFYMPKKATELKHLQCLEEELKPLEEVLNLAGDASIHDLISNINVIVSELKGSETTFMCEYADETATIVEFLNRWITFSQSIISTLT

SEQ ID NO: 489 - protein, 129 aa, artificial sequence
  synthetic sequence
APASSSTKKTQLQLEHLLLNLQMILNGINNYKNPKLTRMLTFKFYMPKKATELKHLQCLEEELKPLEEVLNLAGDASIHDLISNINVIVLELKGSETTFMCEYADETATIVEFLNRWITFSQSIISTLT

SEQ ID NO: 490 - protein, 129 aa, artificial sequence
  synthetic sequence
APASSSTKKTQLQLEHLLLQLQMILNGINNYKNPKLTRMLTFKFYMPKKATELKHLQCLEEELKPLEEVLNLAGDASIHDLISNINVIVLELKGSETTFMCEYADETATIVEFLNRWITFSQSIISTLT

SEQ ID NO: 491 - protein, 129 aa, artificial sequence
  synthetic sequence
APASSSTKKTQLQLEHLLLELQMILNGINNYKNPKLTRMLTFKFYMPKKATELKHLQCLEEELKPLEEVLNLAGDASIHDLISNINVIVLELKGSETTFMCEYADETATIVEFLNRWITFSQSIISTLT

SEQ ID NO: 492 - protein, 129 aa, artificial sequence
  synthetic sequence
APASSSTKKTQLQLEHLLLALQMILNGINNYKNPKLTRMLTFKFYMPKKATELKHLQCLEEELKPLEEVLNLAGDASIHDLISNINVIVLELKGSETTFMCEYADETATIVEFLNRWITFSQSIISTLT

SEQ ID NO: 493 - protein, 129 aa, artificial sequence
  synthetic sequence
APASSSTKKTQLQLEHLLLRLQMILNGINNYKNPKLTRMLTFKFYMPKKATELKHLQCLEEELKPLEEVLNLAGDASIHDLISNINVIVLELKGSETTFMCEYADETATIVEFLNRWITFSQSIISTLT

SEQ ID NO: 494 - protein, 129 aa, artificial sequence
  synthetic sequence
APASSSTKKTQLQLEHLLLSLQMILNGINNYKNPKLTRMLTFKFYMPKKATELKHLQCLEEELKPLEEVLNLAGDASIHDLISNINVIVLELKGSETTFMCEYADETATIVEFLNRWITFSQSIISTLT

SEQ ID NO: 495 - protein, 129 aa, artificial sequence
  synthetic sequence
APASSSTKKTQLQLEHLLLDLQMILNGINNYKNPKLTRMLTFKFYMPKKATELKHLQCLEEELKPLEEVLNLAGDASIHNLISNINVIVLELKGSETTFMCEYADETATIVEFLNRWITFSQSIISTLT

SEQ ID NO: 496 - protein, 129 aa, artificial sequence
  synthetic sequence
APASSSTKKTQLQLEHLLLDLQMILNGINNYKNPKLTRMLTFKFYMPKKATELKHLQCLEEELKPLEEVLNLAGDASIHELISNINVIVLELKGSETTFMCEYADETATIVEFLNRWITFSQSIISTLT

SEQ ID NO: 497 - protein, 129 aa, artificial sequence
  synthetic sequence
APASSSTKKTQLQLEHLLLDLQMILNGINNYKNPKLTRMLTFKFYMPKKATELKHLQCLEEELKPLEEVLNLAGDASIHQLISNINVIVLELKGSETTFMCEYADETATIVEFLNRWITFSQSIISTLT

SEQ ID NO: 498 - protein, 129 aa, artificial sequence
  synthetic sequence
APASSSTKKTQLQLEHLLLDLQMILNGINNYKNPKLTRMLTFKFYMPKKATELKHLQCLEEELKPLEEVLNLAGDASIHTLISNINVIVLELKGSETTFMCEYADETATIVEFLNRWITFSQSIISTLT

SEQ ID NO: 499 - protein, 129 aa, artificial sequence
  synthetic sequence
APASSSTKKTQLQLEHLLLDLQMILNGINNYKNPKLTRMLTFKFYMPKKATELKHLQCLEEELKPLEEVLNLAGDASIHSLISNINVIVLELKGSETTFMCEYADETATIVEFLNRWITFSQSIISTLT

SEQ ID NO: 500 - protein, 129 aa, artificial sequence
  synthetic sequence
APASSSTKKTQLQLEHLLLDLQMILNGINNYKNPKLTRMLTFKFYMPKKATELKHLQCLEEELKPLEEVLNLAGDASIHRLISNINVIVLELKGSETTFMCEYADETATIVEFLNRWITFSQSIISTLT

SEQ ID NO: 501 - protein, 129 aa, artificial sequence
  synthetic sequence
APASSSTKKTQLQLEHLLLDLQMILNGINNYKNPKLTRMLTFKFYMPKKATELKHLQCLEEELKPLEEVLNLAGDASIHGLISNINVIVLELKGSETTFMCEYADETATIVEFLNRWITFSQSIISTLT

SEQ ID NO: 502 - protein, 129 aa, artificial sequence
  synthetic sequence
APASSSTKKTQLQLEHLLLDLQMILNGINNYKNPKLTRMLTFKFYMPKKATELKHLQCLEEELKPLEEVLNLAGDASIHMLISNINVIVLELKGSETTFMCEYADETATIVEFLNRWITFSQSIISTLT

SEQ ID NO: 503 - protein, 129 aa, artificial sequence
  synthetic sequence
APASSSTKKTQLQLEHLLLDLQMILNGINNYKNPKLTRMLTFKFYMPKKATELKHLQCLEEELKPLEEVLNLAGDASIHFLISNINVIVLELKGSETTFMCEYADETATIVEFLNRWITFSQSIISTLT

SEQ ID NO: 504 - protein, 129 aa, artificial sequence
  synthetic sequence
APASSSTKKTQLQLEHLLLDLQMILNGINNYKNPKLTRMLTFKFYMPKKATELKHLQCLEEELKPLEEVLNLAGDASIHLLISNINVIVLELKGSETTFMCEYADETATIVEFLNRWITFSQSIISTLT

SEQ ID NO: 505 - protein, 129 aa, artificial sequence
  synthetic sequence
APASSSTKKTQLQLEHLLLDLQMILNGINNYKNPKLTRMLTFKFYMPKKATELKHLQCLEEELKPLEEVLNLAGDASIHKLISNINVIVLELKGSETTFMCEYADETATIVEFLNRWITFSQSIISTLT

SEQ ID NO: 506 - protein, 129 aa, artificial sequence
  synthetic sequence
APASSSTKKTQLQLEHLLLDLQMILNGINNYKNPKLTRMLTFKFYMPKKATELKHLQCLEEELKPLEEVLNLAGDASIHHLISNINVIVLELKGSETTFMCEYADETATIVEFLNRWITFSQSIISTLT

SEQ ID NO: 507 - protein, 129 aa, artificial sequence
  synthetic sequence
APASSSTKKTQLQLEHLLLDLQMILNGINNYKNPKLTRMLTFKFYMPKKATELKHLQCLEEELKPLEEVLNLAGDASIHDLITNINVIVLELKGSETTFMCEYADETATIVEFLNRWITFSQSIISTLT

SEQ ID NO: 508 - protein, 129 aa, artificial sequence
  synthetic sequence
APASSSTKKTQLQLEHLLLDLQMILNGINNYKNPKLTRMLTFKFYMPKKATELKHLQCLEEELKPLEEVLNLAGDASIHDLIRNINVIVLELKGSETTFMCEYADETATIVEFLNRWITFSQSIISTLT

SEQ ID NO: 509 - protein, 129 aa, artificial sequence
  synthetic sequence
APASSSTKKTQLQLEHLLLDLQMILNGINNYKNPKLTRMLTFKFYMPKKATELKHLQCLEEELKPLEEVLNLAGDASIHDLIKNINVIVLELKGSETTFMCEYADETATIVEFLNRWITFSQSIISTLT

SEQ ID NO: 510 - protein, 129 aa, artificial sequence
  synthetic sequence
APASSSTKKTQLQLEHLLLDLQMILNGINNYKNPKLTRMLTFKFYMPKKATELKHLQCLEEELKPLEEVLNLAGDASIHDLILNINVIVLELKGSETTFMCEYADETATIVEFLNRWITFSQSIISTLT

SEQ ID NO: 511 - protein, 129 aa, artificial sequence
  synthetic sequence
APASSSTKKTQLQLEHLLLDLQMILNGINNYKNPKLTRMLTFKFYMPKKATELKHLQCLEEELKPLEEVLNLAGDASIHDLIMNINVIVLELKGSETTFMCEYADETATIVEFLNRWITFSQSIISTLT

SEQ ID NO: 512 - protein, 129 aa, artificial sequence
  synthetic sequence
APASSSTKKTQLQLEHLLLDLQMILNGINNYKNPKLTRMLTFKFYMPKKATELKHLQCLEEELKPLEEVLNLAGDASIHDLIHNINVIVLELKGSETTFMCEYADETATIVEFLNRWITFSQSIISTLT

SEQ ID NO: 513 - protein, 129 aa, artificial sequence
  synthetic sequence
APASSSTKKTQLQLEHLLLDLQMILNGINNYKNPKLTRMLTFKFYMPKKATELKHLQCLEEELKPLEEVLNLAGDASIHDLISDINVIVLELKGSETTFMCEYADETATIVEFLNRWITFSQSIISTLT

SEQ ID NO: 514 - protein, 129 aa, artificial sequence
  synthetic sequence
APASSSTKKTQLQLEHLLLDLQMILNGINNYKNPKLTRMLTFKFYMPKKATELKHLQCLEEELKPLEEVLNLAGDASIHDLISTINVIVLELKGSETTFMCEYADETATIVEFLNRWITFSQSIISTLT

SEQ ID NO: 515 - protein, 129 aa, artificial sequence
  synthetic sequence
APASSSTKKTQLQLEHLLLDLQMILNGINNYKNPKLTRMLTFKFYMPKKATELKHLQCLEEELKPLEEVLNLAGDASIHDLISQINVIVLELKGSETTFMCEYADETATIVEFLNRWITFSQSIISTLT

SEQ ID NO: 516 - protein, 129 aa, artificial sequence
  synthetic sequence
APASSSTKKTQLQLEHLLLDLQMILNGINNYKNPKLTRMLTFKFYMPKKATELKHLQCLEEELKPLEEVLNLAGDASIHDLISRINVIVLELKGSETTFMCEYADETATIVEFLNRWITFSQSIISTLT

SEQ ID NO: 517 - protein, 129 aa, artificial sequence
  synthetic sequence
APASSSTKKTQLQLEHLLLDLQMILNGINNYKNPKLTRMLTFKFYMPKKATELKHLQCLEEELKPLEEVLNLAGDASIHDLISEINVIVLELKGSETTFMCEYADETATIVEFLNRWITFSQSIISTLT

SEQ ID NO: 518 - protein, 129 aa, artificial sequence
  synthetic sequence
APASSSTKKTQLQLEHLLLDLQMILNGINNYKNPKLTRMLTFKFYMPKKATELKHLQCLEEELKPLEEVLNLAGDASIHDLISKINVIVLELKGSETTFMCEYADETATIVEFLNRWITFSQSIISTLT

SEQ ID NO: 519 - protein, 129 aa, artificial sequence
  synthetic sequence
APASSSTKKTQLQLEHLLLDLQMILNGINNYKNPKLTRMLTFKFYMPKKATELKHLQCLEEELKPLEEVLNLAGDASIHDLISHINVIVLELKGSETTFMCEYADETATIVEFLNRWITFSQSIISTLT

SEQ ID NO: 520 - protein, 129 aa, artificial sequence
  synthetic sequence
APASSSTKKTQLQLEHLLLDLQMILNGINNYKNPKLTRMLTFKFYMPKKATELKHLQCLEEELKPLEEVLNLAGDASIHDLISMINVIVLELKGSETTFMCEYADETATIVEFLNRWITFSQSIISTLT

SEQ ID NO: 521 - protein, 129 aa, artificial sequence
  synthetic sequence
APASSSTKKTQLQLEHLLLDLQMILNGINNYKNPKLTRMLTFKFYMPKKATELKHLQCLEEELKPLEEVLNLAGDASIHDLISSINVIVLELKGSETTFMCEYADETATIVEFLNRWITFSQSIISTLT

SEQ ID NO: 522 - protein, 129 aa, artificial sequence
  synthetic sequence
APASSSTKKTQLQLEHLLLDLQMILNGINNYKNPKLTRMLTFKFYMPKKATELKHLQCLEEELKPLEEVLNLAGDASIHDLISLINVIVLELKGSETTFMCEYADETATIVEFLNRWITFSQSIISTLT

SEQ ID NO: 523 - protein, 129 aa, artificial sequence
  synthetic sequence
APASSSTKKTQLQLEHLLLDLQMILNGINNYKNPKLTRMLTFKFYMPKKATELKHLQCLEEELKPLEEVLNLAGDASIHDLISNINIIVLELKGSETTFMCEYADETATIVEFLNRWITFSQSIISTLT

SEQ ID NO: 524 - protein, 129 aa, artificial sequence
  synthetic sequence
APASSSTKKTQLQLEHLLLDLQMILNGINNYKNPKLTRMLTFKFYMPKKATELKHLQCLEEELKPLEEVLNLAGDASIHDLISNINLIVLELKGSETTFMCEYADETATIVEFLNRWITFSQSIISTLT

SEQ ID NO: 525 - protein, 129 aa, artificial sequence
  synthetic sequence
APASSSTKKTQLQLEHLLLDLQMILNGINNYKNPKLTRMLTFKFYMPKKATELKHLQCLEEELKPLEEVLNLAGDASIHDLISNINDIVLELKGSETTFMCEYADETATIVEFLNRWITFSQSIISTLT

SEQ ID NO: 526 - protein, 129 aa, artificial sequence
  synthetic sequence
APASSSTKKTQLQLEHLLLDLQMILNGINNYKNPKLTRMLTFKFYMPKKATELKHLQCLEEELKPLEEVLNLAGDASIHDLISNINEIVLELKGSETTFMCEYADETATIVEFLNRWITFSQSIISTLT

SEQ ID NO: 527 - protein, 129 aa, artificial sequence
  synthetic sequence
APASSSTKKTQLQLEHLLLDLQMILNGINNYKNPKLTRMLTFKFYMPKKATELKHLQCLEEELKPLEEVLNLAGDASIHDLISNINNIVLELKGSETTFMCEYADETATIVEFLNRWITFSQSIISTLT

SEQ ID NO: 528 - protein, 129 aa, artificial sequence
  synthetic sequence
APASSSTKKTQLQLEHLLLDLQMILNGINNYKNPKLTRMLTFKFYMPKKATELKHLQCLEEELKPLEEVLNLAGDASIHDLISNINQIVLELKGSETTFMCEYADETATIVEFLNRWITFSQSIISTLT

SEQ ID NO: 529 - protein, 129 aa, artificial sequence
  synthetic sequence
APASSSTKKTQLQLEHLLLDLQMILNGINNYKNPKLTRMLTFKFYMPKKATELKHLQCLEEELKPLEEVLNLAGDASIHDLISNINSIVLELKGSETTFMCEYADETATIVEFLNRWITFSQSIISTLT

SEQ ID NO: 530 - protein, 129 aa, artificial sequence
  synthetic sequence
APASSSTKKTQLQLEHLLLDLQMILNGINNYKNPKLTRMLTFKFYMPKKATELKHLQCLEEELKPLEEVLNLAGDASIHDLISNINHIVLELKGSETTFMCEYADETATIVEFLNRWITFSQSIISTLT

SEQ ID NO: 531 - protein, 129 aa, artificial sequence
  synthetic sequence
APASSSTKKTQLQLEHLLLDLQMILNGINNYKNPKLTRMLTFKFYMPKKATELKHLQCLEEELKPLEEVLNLAGDASIHDLISNINVEVLELKGSETTFMCEYADETATIVEFLNRWITFSQSIISTLT

SEQ ID NO: 532 - protein, 129 aa, artificial sequence
  synthetic sequence
APASSSTKKTQLQLEHLLLDLQMILNGINNYKNPKLTRMLTFKFYMPKKATELKHLQCLEEELKPLEEVLNLAGDASIHDLISNINVTVLELKGSETTFMCEYADETATIVEFLNRWITFSQSIISTLT

SEQ ID NO: 533 - protein, 129 aa, artificial sequence
  synthetic sequence
APASSSTKKTQLQLEHLLLDLQMILNGINNYKNPKLTRMLTFKFYMPKKATELKHLQCLEEELKPLEEVLNLAGDASIHDLISNINVKVLELKGSETTFMCEYADETATIVEFLNRWITFSQSIISTLT

SEQ ID NO: 534 - protein, 129 aa, artificial sequence
  synthetic sequence
APASSSTKKTQLQLEHLLLDLQMILNGINNYKNPKLTRMLTFKFYMPKKATELKHLQCLEEELKPLEEVLNLAGDASIHDLISNINVRVLELKGSETTFMCEYADETATIVEFLNRWITFSQSIISTLT

SEQ ID NO: 535 - protein, 129 aa, artificial sequence
  synthetic sequence
APASSSTKKTQLQLEHLLLDLQMILNGINNYKNPKLTRMLTFKFYMPKKATELKHLQCLEEELKPLEEVLNLAGDASIHDLISNINVLVLELKGSETTFMCEYADETATIVEFLNRWITFSQSIISTLT

SEQ ID NO: 536 - protein, 129 aa, artificial sequence
  synthetic sequence
APASSSTKKTQLQLEHLLLDLQMILNGINNYKNPKLTRMLTFKFYMPKKATELKHLQCLEEELKPLEEVLNLAGDASIHDLISNINVIVLQLKGSETTFMCEYADETATIVEFLNRWITFSQSIISTLT

SEQ ID NO: 537 - protein, 129 aa, artificial sequence
  synthetic sequence
APASSSTKKTQLQLEHLLLDLQMILNGINNYKNPKLTRMLTFKFYMPKKATELKHLQCLEEELKPLEEVLNLAGDASIHDLISNINVIVLGLKGSETTFMCEYADETATIVEFLNRWITFSQSIISTLT

SEQ ID NO: 538 - protein, 129 aa, artificial sequence
  synthetic sequence
APASSSTKKTQLQLEHLLLDLQMILNGINNYKNPKLTRMLTFKFYMPKKATELKHLQCLEEELKPLEEVLNLAGDASIHDLISNINVIVLDLKGSETTFMCEYADETATIVEFLNRWITFSQSIISTLT

SEQ ID NO: 539 - protein, 129 aa, artificial sequence
  synthetic sequence
APASSSTKKTQLQLEHLLLDLQMILNGINNYKNPKLTRMLTFKFYMPKKATELKHLQCLEEELKPLEEVLNLAGDASIHDLISNINVIVLNLKGSETTFMCEYADETATIVEFLNRWITFSQSIISTLT

SEQ ID NO: 540 - protein, 129 aa, artificial sequence
  synthetic sequence
APASSSTKKTQLQLEHLLLDLQMILNGINNYKNPKLTRMLTFKFYMPKKATELKHLQCLEEELKPLEEVLNLAGDASIHDLISNINVIVLELKGSETTFMCEYADETATIVEFLNRWITFSESIISTLT

SEQ ID NO: 541 - protein, 129 aa, artificial sequence
  synthetic sequence
APASSSTKKTQLQLEHLLLDLQMILNGINNYKNPKLTRMLTFKFYMPKKATELKHLQCLEEELKPLEEVLNLAGDASIHDLISNINVIVLELKGSETTFMCEYADETATIVEFLNRWITFSDSIISTLT

SEQ ID NO: 542 - protein, 129 aa, artificial sequence
  synthetic sequence
APASSSTKKTQLQLEHLLLDLQMILNGINNYKNPKLTRMLTFKFYMPKKATELKHLQCLEEELKPLEEVLNLAGDASIHDLISNINVIVLELKGSETTFMCEYADETATIVEFLNRWITFSASIISTLT

SEQ ID NO: 543 - protein, 129 aa, artificial sequence
  synthetic sequence
APASSSTKKTQLQLEHLLLDLQMILNGINNYKNPKLTRMLTFKFYMPKKATELKHLQCLEEELKPLEEVLNLAGDASIHDLISNINVIVLELKGSETTFMCEYADETATIVEFLNRWITFSSSIISTLT

SEQ ID NO: 544 - protein, 129 aa, artificial sequence
  synthetic sequence
APASSSTKKTQLQLEHLLLDLQMILNGINNYKNPKLTRMLTFKFYMPKKATELKHLQCLEEELKPLEEVLNLAGDASIHNLISNINVIVLQLKGSETTFMCEYADETATIVEFLNRWITFSQSIISTLT

SEQ ID NO: 545 - protein, 129 aa, artificial sequence
  synthetic sequence
APASSSTKKTQLQLEHLLLDLQMILNGINNYKNPKLTRMLTFKFYMPKKATELKHLQCLEEELKPLEEVLNLAGDASIHELISNINVIVLQLKGSETTFMCEYADETATIVEFLNRWITFSQSIISTLT

SEQ ID NO: 546 - protein, 129 aa, artificial sequence
  synthetic sequence
APASSSTKKTQLQLEHLLLDLQMILNGINNYKNPKLTRMLTFKFYMPKKATELKHLQCLEEELKPLEEVLNLAGDASIHTLISNINVIVLQLKGSETTFMCEYADETATIVEFLNRWITFSQSIISTLT

SEQ ID NO: 547 - protein, 129 aa, artificial sequence
  synthetic sequence
APASSSTKKTQLQLEHLLLDLQMILNGINNYKNPKLTRMLTFKFYMPKKATELKHLQCLEEELKPLEEVLNLAGDASIHQLISNINVIVLQLKGSETTFMCEYADETATIVEFLNRWITFSQSIISTLT

SEQ ID NO: 548 - protein, 129 aa, artificial sequence
  synthetic sequence
APASSSTKKTQLQLETLLLDLQMILNGINNYKNPKLTRMLTFKFYMPKKATELKHLQCLEEELKPLEEVLNLAGDASIHTLISNINVIVLELKGSETTFMCEYADETATIVEFLNRWITFSQSIISTLT

SEQ ID NO: 549 - protein, 129 aa, artificial sequence
  synthetic sequence
APASSSTKKTQLQLEHLLLDLQMILNGINNYKNPKLTRMLTFKFYMPKKATELKHLQCLEEELKPLEEVLNLAGDASIHNLISNINIIVLELKGSETTFMCEYADETATIVEFLNRWITFSQSIISTLT

SEQ ID NO: 550 - protein, 129 aa, artificial sequence
  synthetic sequence
APASSSTKKTQLQLEHLLLDLQMILNGINNYKNPKLTRMLTFKFYMPKKATELKHLQCLEEELKPLEEVLNLAGDASIHTLISNINVIVLELKGSETTFMCEYADETATIVEFLNRWITFSESIISTLT

SEQ ID NO: 551 - protein, 129 aa, artificial sequence
  synthetic sequence
APASSSTKKTQLQLEHLLLDLQMILNGINNYKNPKLTRMLTFKFYMPKKATELKHLQCLEEELKPLEEVLNLAGDASIHNLISNINVIVLELKGSETTFMCEYADETATIVEFLNRWITFSESIISTLT

SEQ ID NO: 552 - protein, 129 aa, artificial sequence
  synthetic sequence
APASSSTKKTQLQLETLLLDLQMILNGINNYKNPKLTRMLTFKFYMPKKATELKHLQCLEEELKPLEEVLNLAGDASIHQLISNINVIVLELKGSETTFMCEYADETATIVEFLNRWITFSQSIISTLT

SEQ ID NO: 553 - protein, 129 aa, artificial sequence
  synthetic sequence
APASSSTKKTQLQLETLLLDLQMILNGINNYKNPKLTRMLTFKFYMPKKATELKHLQCLEEELKPLEEVLNLAGDASIHDLISNINIIVLELKGSETTFMCEYADETATIVEFLNRWITFSQSIISTLT

SEQ ID NO: 554 - protein, 129 aa, artificial sequence; identical to SEQ ID NO: 35
  synthetic sequence

SEQ ID NO: 555 - protein, 129 aa, artificial sequence
  synthetic sequence
APASSSTKKTQRQLEHLLLDLQMILNGINNYKNPKLTRMLTFKFYMPKKATELKHLQCLEEELKPLEEVLNLAQSKNFHDLISNINVIVLELKGSETTFMCEYADETATIVEFLNRWITFSQSIISTLT

SEQ ID NO: 556 - protein, 129 aa, artificial sequence
  synthetic sequence
APASSSTKKTQKQLEHLLLDLQMILNGINNYKNPKLTRMLTFKFYMPKKATELKHLQCLEEELKPLEEVLNLAQSKNFHDLISNINVIVLELKGSETTFMCEYADETATIVEFLNRWITFSQSIISTLT

SEQ ID NO: 557 - protein, 129 aa, artificial sequence
  synthetic sequence
APASSSTKKTQEQLEHLLLDLQMILNGINNYKNPKLTRMLTFKFYMPKKATELKHLQCLEEELKPLEEVLNLAQSKNFHDLISNINVIVLELKGSETTFMCEYADETATIVEFLNRWITFSQSIISTLT

SEQ ID NO: 558 - protein, 129 aa, artificial sequence
  synthetic sequence
APASSSTKKTQQQLEHLLLDLQMILNGINNYKNPKLTRMLTFKFYMPKKATELKHLQCLEEELKPLEEVLNLAQSKNFHDLISNINVIVLELKGSETTFMCEYADETATIVEFLNRWITFSQSIISTLT

SEQ ID NO: 559 - protein, 129 aa, artificial sequence
  synthetic sequence
APASSSTKKTQLQLQHLLLDLQMILNGINNYKNPKLTRMLTFKFYMPKKATELKHLQCLEEELKPLEEVLNLAQSKNFHDLISNINVIVLELKGSETTFMCEYADETATIVEFLNRWITFSQSIISTLT

SEQ ID NO: 560 - protein, 129 aa, artificial sequence
  synthetic sequence
APASSSTKKTQLQLRHLLLDLQMILNGINNYKNPKLTRMLTFKFYMPKKATELKHLQCLEEELKPLEEVLNLAQSKNFHDLISNINVIVLELKGSETTFMCEYADETATIVEFLNRWITFSQSIISTLT

SEQ ID NO: 561 - protein, 129 aa, artificial sequence
  synthetic sequence
APASSSTKKTQLQLAHLLLDLQMILNGINNYKNPKLTRMLTFKFYMPKKATELKHLQCLEEELKPLEEVLNLAQSKNFHDLISNINVIVLELKGSETTFMCEYADETATIVEFLNRWITFSQSIISTLT

SEQ ID NO: 562 - protein, 129 aa, artificial sequence
  synthetic sequence
APASSSTKKTQLQLSHLLLDLQMILNGINNYKNPKLTRMLTFKFYMPKKATELKHLQCLEEELKPLEEVLNLAQSKNFHDLISNINVIVLELKGSETTFMCEYADETATIVEFLNRWITFSQSIISTLT

SEQ ID NO: 563 - protein, 129 aa, artificial sequence
  synthetic sequence
APASSSTKKTQLQLENLLLDLQMILNGINNYKNPKLTRMLTFKFYMPKKATELKHLQCLEEELKPLEEVLNLAQSKNFHDLISNINVIVLELKGSETTFMCEYADETATIVEFLNRWITFSQSIISTLT

SEQ ID NO: 564 - protein, 129 aa, artificial sequence
  synthetic sequence
APASSSTKKTQLQLETLLLDLQMILNGINNYKNPKLTRMLTFKFYMPKKATELKHLQCLEEELKPLEEVLNLAQSKNFHDLISNINVIVLELKGSETTFMCEYADETATIVEFLNRWITFSQSIISTLT

SEQ ID NO: 565 - protein, 129 aa, artificial sequence
  synthetic sequence
APASSSTKKTQLQLEYLLLDLQMILNGINNYKNPKLTRMLTFKFYMPKKATELKHLQCLEEELKPLEEVLNLAQSKNFHDLISNINVIVLELKGSETTFMCEYADETATIVEFLNRWITFSQSIISTLT

SEQ ID NO: 566 - protein, 129 aa, artificial sequence
  synthetic sequence
APASSSTKKTQLQLEALLLDLQMILNGINNYKNPKLTRMLTFKFYMPKKATELKHLQCLEEELKPLEEVLNLAQSKNFHDLISNINVIVLELKGSETTFMCEYADETATIVEFLNRWITFSQSIISTLT

SEQ ID NO: 567 - protein, 129 aa, artificial sequence
  synthetic sequence
APASSSTKKTQLQLEELLLDLQMILNGINNYKNPKLTRMLTFKFYMPKKATELKHLQCLEEELKPLEEVLNLAQSKNFHDLISNINVIVLELKGSETTFMCEYADETATIVEFLNRWITFSQSIISTLT

SEQ ID NO: 568 - protein, 129 aa, artificial sequence
  synthetic sequence
APASSSTKKTQLQLEDLLLDLQMILNGINNYKNPKLTRMLTFKFYMPKKATELKHLQCLEEELKPLEEVLNLAQSKNFHDLISNINVIVLELKGSETTFMCEYADETATIVEFLNRWITFSQSIISTLT

SEQ ID NO: 569 - protein, 129 aa, artificial sequence
  synthetic sequence
APASSSTKKTQLQLERLLLDLQMILNGINNYKNPKLTRMLTFKFYMPKKATELKHLQCLEEELKPLEEVLNLAQSKNFHDLISNINVIVLELKGSETTFMCEYADETATIVEFLNRWITFSQSIISTLT

SEQ ID NO: 570 - protein, 129 aa, artificial sequence
  synthetic sequence
APASSSTKKTQLQLEHLLDDLQMILNGINNYKNPKLTRMLTFKFYMPKKATELKHLQCLEEELKPLEEVLNLAQSKNFHDLISNINVIVDELKGSETTFMCEYADETATIVEFLNRWITFSQSIISTLT

SEQ ID NO: 571 - protein, 129 aa, artificial sequence
  synthetic sequence
APASSSTKKTQLQLEHLLEDLQMILNGINNYKNPKLTRMLTFKFYMPKKATELKHLQCLEEELKPLEEVLNLAQSKNFHDLISNINVIVEELKGSETTFMCEYADETATIVEFLNRWITFSQSIISTLT

SEQ ID NO: 572 - protein, 129 aa, artificial sequence
  synthetic sequence
APASSSTKKTQLQLEHLLRDLQMILNGINNYKNPKLTRMLTFKFYMPKKATELKHLQCLEEELKPLEEVLNLAQSKNFHDLISNINVIVRELKGSETTFMCEYADETATIVEFLNRWITFSQSIISTLT

SEQ ID NO: 573 - protein, 129 aa, artificial sequence
  synthetic sequence
APASSSTKKTQLQLEHLLSDLQMILNGINNYKNPKLTRMLTFKFYMPKKATELKHLQCLEEELKPLEEVLNLAQSKNFHDLISNINVIVSELKGSETTFMCEYADETATIVEFLNRWITFSQSIISTLT

SEQ ID NO: 574 - protein, 129 aa, artificial sequence
  synthetic sequence
APASSSTKKTQLQLEHLLLNLQMILNGINNYKNPKLTRMLTFKFYMPKKATELKHLQCLEEELKPLEEVLNLAQSKNFHDLISNINVIVLELKGSETTFMCEYADETATIVEFLNRWITFSQSIISTLT

SEQ ID NO: 575 - protein, 129 aa, artificial sequence
  synthetic sequence
APASSSTKKTQLQLEHLLLQLQMILNGINNYKNPKLTRMLTFKFYMPKKATELKHLQCLEEELKPLEEVLNLAQSKNFHDLISNINVIVLELKGSETTFMCEYADETATIVEFLNRWITFSQSIISTLT

SEQ ID NO: 576 - protein, 129 aa, artificial sequence
  synthetic sequence
APASSSTKKTQLQLEHLLLELQMILNGINNYKNPKLTRMLTFKFYMPKKATELKHLQCLEEELKPLEEVLNLAQSKNFHDLISNINVIVLELKGSETTFMCEYADETATIVEFLNRWITFSQSIISTLT

SEQ ID NO: 577 - protein, 129 aa, artificial sequence
  synthetic sequence
APASSSTKKTQLQLEHLLLALQMILNGINNYKNPKLTRMLTFKFYMPKKATELKHLQCLEEELKPLEEVLNLAQSKNFHDLISNINVIVLELKGSETTFMCEYADETATIVEFLNRWITFSQSIISTLT

SEQ ID NO: 578 - protein, 129 aa, artificial sequence
  synthetic sequence
APASSSTKKTQLQLEHLLLRLQMILNGINNYKNPKLTRMLTFKFYMPKKATELKHLQCLEEELKPLEEVLNLAQSKNFHDLISNINVIVLELKGSETTFMCEYADETATIVEFLNRWITFSQSIISTLT

SEQ ID NO: 579 - protein, 129 aa, artificial sequence
  synthetic sequence
APASSSTKKTQLQLEHLLLSLQMILNGINNYKNPKLTRMLTFKFYMPKKATELKHLQCLEEELKPLEEVLNLAQSKNFHDLISNINVIVLELKGSETTFMCEYADETATIVEFLNRWITFSQSIISTLT

SEQ ID NO: 580 - protein, 129 aa, artificial sequence
  synthetic sequence
APASSSTKKTQLQLEHLLLDLQMILNGINNYKNPKLTRMLTFKFYMPKKATELKHLQCLEEELKPLEEVLNLAQSKNFHNLISNINVIVLELKGSETTFMCEYADETATIVEFLNRWITFSQSIISTLT

SEQ ID NO: 581 - protein, 129 aa, artificial sequence
  synthetic sequence
APASSSTKKTQLQLEHLLLDLQMILNGINNYKNPKLTRMLTFKFYMPKKATELKHLQCLEEELKPLEEVLNLAQSKNFHELISNINVIVLELKGSETTFMCEYADETATIVEFLNRWITFSQSIISTLT

SEQ ID NO: 582 - protein, 129 aa, artificial sequence
  synthetic sequence
APASSSTKKTQLQLEHLLLDLQMILNGINNYKNPKLTRMLTFKFYMPKKATELKHLQCLEEELKPLEEVLNLAQSKNFHQLISNINVIVLELKGSETTFMCEYADETATIVEFLNRWITFSQSIISTLT

SEQ ID NO: 583 - protein, 129 aa, artificial sequence
  synthetic sequence
APASSSTKKTQLQLEHLLLDLQMILNGINNYKNPKLTRMLTFKFYMPKKATELKHLQCLEEELKPLEEVLNLAQSKNFHTLISNINVIVLELKGSETTFMCEYADETATIVEFLNRWITFSQSIISTLT

SEQ ID NO: 584 - protein, 129 aa, artificial sequence
  synthetic sequence
APASSSTKKTQLQLEHLLLDLQMILNGINNYKNPKLTRMLTFKFYMPKKATELKHLQCLEEELKPLEEVLNLAQSKNFHSLISNINVIVLELKGSETTFMCEYADETATIVEFLNRWITFSQSIISTLT

SEQ ID NO: 585 - protein, 129 aa, artificial sequence
  synthetic sequence
APASSSTKKTQLQLEHLLLDLQMILNGINNYKNPKLTRMLTFKFYMPKKATELKHLQCLEEELKPLEEVLNLAQSKNFHRLISNINVIVLELKGSETTFMCEYADETATIVEFLNRWITFSQSIISTLT

SEQ ID NO: 586 - protein, 129 aa, artificial sequence
  synthetic sequence
APASSSTKKTQLQLEHLLLDLQMILNGINNYKNPKLTRMLTFKFYMPKKATELKHLQCLEEELKPLEEVLNLAQSKNFHGLISNINVIVLELKGSETTFMCEYADETATIVEFLNRWITFSQSIISTLT

SEQ ID NO: 587 - protein, 129 aa, artificial sequence
  synthetic sequence
APASSSTKKTQLQLEHLLLDLQMILNGINNYKNPKLTRMLTFKFYMPKKATELKHLQCLEEELKPLEEVLNLAQSKNFHMLISNINVIVLELKGSETTFMCEYADETATIVEFLNRWITFSQSIISTLT

SEQ ID NO: 588 - protein, 129 aa, artificial sequence
  synthetic sequence
APASSSTKKTQLQLEHLLLDLQMILNGINNYKNPKLTRMLTFKFYMPKKATELKHLQCLEEELKPLEEVLNLAQSKNFHFLISNINVIVLELKGSETTFMCEYADETATIVEFLNRWITFSQSIISTLT

SEQ ID NO: 589 - protein, 129 aa, artificial sequence
  synthetic sequence
APASSSTKKTQLQLEHLLLDLQMILNGINNYKNPKLTRMLTFKFYMPKKATELKHLQCLEEELKPLEEVLNLAQSKNFHLLISNINVIVLELKGSETTFMCEYADETATIVEFLNRWITFSQSIISTLT

SEQ ID NO: 590 - protein, 129 aa, artificial sequence
  synthetic sequence
APASSSTKKTQLQLEHLLLDLQMILNGINNYKNPKLTRMLTFKFYMPKKATELKHLQCLEEELKPLEEVLNLAQSKNFHKLISNINVIVLELKGSETTFMCEYADETATIVEFLNRWITFSQSIISTLT

SEQ ID NO: 591 - protein, 129 aa, artificial sequence
  synthetic sequence
APASSSTKKTQLQLEHLLLDLQMILNGINNYKNPKLTRMLTFKFYMPKKATELKHLQCLEEELKPLEEVLNLAQSKNFHHLISNINVIVLELKGSETTFMCEYADETATIVEFLNRWITFSQSIISTLT

SEQ ID NO: 592 - protein, 129 aa, artificial sequence
  synthetic sequence
APASSSTKKTQLQLEHLLLDLQMILNGINNYKNPKLTRMLTFKFYMPKKATELKHLQCLEEELKPLEEVLNLAQSKNFHDLITNINVIVLELKGSETTFMCEYADETATIVEFLNRWITFSQSIISTLT

SEQ ID NO: 593 - protein, 129 aa, artificial sequence
  synthetic sequence
APASSSTKKTQLQLEHLLLDLQMILNGINNYKNPKLTRMLTFKFYMPKKATELKHLQCLEEELKPLEEVLNLAQSKNFHDLIRNINVIVLELKGSETTFMCEYADETATIVEFLNRWITFSQSIISTLT

SEQ ID NO: 594 - protein, 129 aa, artificial sequence
  synthetic sequence
APASSSTKKTQLQLEHLLLDLQMILNGINNYKNPKLTRMLTFKFYMPKKATELKHLQCLEEELKPLEEVLNLAQSKNFHDLIKNINVIVLELKGSETTFMCEYADETATIVEFLNRWITFSQSIISTLT

SEQ ID NO: 595 - protein, 129 aa, artificial sequence
  synthetic sequence
APASSSTKKTQLQLEHLLLDLQMILNGINNYKNPKLTRMLTFKFYMPKKATELKHLQCLEEELKPLEEVLNLAQSKNFHDLILNINVIVLELKGSETTFMCEYADETATIVEFLNRWITFSQSIISTLT

SEQ ID NO: 596 - protein, 129 aa, artificial sequence
  synthetic sequence
APASSSTKKTQLQLEHLLLDLQMILNGINNYKNPKLTRMLTFKFYMPKKATELKHLQCLEEELKPLEEVLNLAQSKNFHDLIMNINVIVLELKGSETTFMCEYADETATIVEFLNRWITFSQSIISTLT

SEQ ID NO: 597 - protein, 129 aa, artificial sequence
  synthetic sequence
APASSSTKKTQLQLEHLLLDLQMILNGINNYKNPKLTRMLTFKFYMPKKATELKHLQCLEEELKPLEEVLNLAQSKNFHDLIHNINVIVLELKGSETTFMCEYADETATIVEFLNRWITFSQSIISTLT

SEQ ID NO: 598 - protein, 129 aa, artificial sequence
  synthetic sequence
APASSSTKKTQLQLEHLLLDLQMILNGINNYKNPKLTRMLTFKFYMPKKATELKHLQCLEEELKPLEEVLNLAQSKNFHDLISDINVIVLELKGSETTFMCEYADETATIVEFLNRWITFSQSIISTLT

SEQ ID NO: 599 - protein, 129 aa, artificial sequence
  synthetic sequence
APASSSTKKTQLQLEHLLLDLQMILNGINNYKNPKLTRMLTFKFYMPKKATELKHLQCLEEELKPLEEVLNLAQSKNFHDLISTINVIVLELKGSETTFMCEYADETATIVEFLNRWITFSQSIISTLT

SEQ ID NO: 600 - protein, 129 aa, artificial sequence
  synthetic sequence
APASSSTKKTQLQLEHLLLDLQMILNGINNYKNPKLTRMLTFKFYMPKKATELKHLQCLEEELKPLEEVLNLAQSKNFHDLISQINVIVLELKGSETTFMCEYADETATIVEFLNRWITFSQSIISTLT

SEQ ID NO: 601 - protein, 129 aa, artificial sequence
  synthetic sequence
APASSSTKKTQLQLEHLLLDLQMILNGINNYKNPKLTRMLTFKFYMPKKATELKHLQCLEEELKPLEEVLNLAQSKNFHDLISRINVIVLELKGSETTFMCEYADETATIVEFLNRWITFSQSIISTLT

SEQ ID NO: 602 - protein, 129 aa, artificial sequence
  synthetic sequence
APASSSTKKTQLQLEHLLLDLQMILNGINNYKNPKLTRMLTFKFYMPKKATELKHLQCLEEELKPLEEVLNLAQSKNFHDLISEINVIVLELKGSETTFMCEYADETATIVEFLNRWITFSQSIISTLT

SEQ ID NO: 603 - protein, 129 aa, artificial sequence
  synthetic sequence
APASSSTKKTQLQLEHLLLDLQMILNGINNYKNPKLTRMLTFKFYMPKKATELKHLQCLEEELKPLEEVLNLAQSKNFHDLISKINVIVLELKGSETTFMCEYADETATIVEFLNRWITFSQSIISTLT

SEQ ID NO: 604 - protein, 129 aa, artificial sequence
  synthetic sequence
APASSSTKKTQLQLEHLLLDLQMILNGINNYKNPKLTRMLTFKFYMPKKATELKHLQCLEEELKPLEEVLNLAQSKNFHDLISHINVIVLELKGSETTFMCEYADETATIVEFLNRWITFSQSIISTLT

SEQ ID NO: 605 - protein, 129 aa, artificial sequence
  synthetic sequence
APASSSTKKTQLQLEHLLLDLQMILNGINNYKNPKLTRMLTFKFYMPKKATELKHLQCLEEELKPLEEVLNLAQSKNFHDLISMINVIVLELKGSETTFMCEYADETATIVEFLNRWITFSQSIISTLT

SEQ ID NO: 606 - protein, 129 aa, artificial sequence
  synthetic sequence
APASSSTKKTQLQLEHLLLDLQMILNGINNYKNPKLTRMLTFKFYMPKKATELKHLQCLEEELKPLEEVLNLAQSKNFHDLISSINVIVLELKGSETTFMCEYADETATIVEFLNRWITFSQSIISTLT

SEQ ID NO: 607 - protein, 129 aa, artificial sequence
  synthetic sequence
APASSSTKKTQLQLEHLLLDLQMILNGINNYKNPKLTRMLTFKFYMPKKATELKHLQCLEEELKPLEEVLNLAQSKNFHDLISLINVIVLELKGSETTFMCEYADETATIVEFLNRWITFSQSIISTLT

SEQ ID NO: 608 - protein, 129 aa, artificial sequence
  synthetic sequence
APASSSTKKTQLQLEHLLLDLQMILNGINNYKNPKLTRMLTFKFYMPKKATELKHLQCLEEELKPLEEVLNLAQSKNFHDLISNINIIVLELKGSETTFMCEYADETATIVEFLNRWITFSQSIISTLT

SEQ ID NO: 609 - protein, 129 aa, artificial sequence
  synthetic sequence
APASSSTKKTQLQLEHLLLDLQMILNGINNYKNPKLTRMLTFKFYMPKKATELKHLQCLEEELKPLEEVLNLAQSKNFHDLISNINLIVLELKGSETTFMCEYADETATIVEFLNRWITFSQSIISTLT

SEQ ID NO: 610 - protein, 129 aa, artificial sequence
  synthetic sequence
APASSSTKKTQLQLEHLLLDLQMILNGINNYKNPKLTRMLTFKFYMPKKATELKHLQCLEEELKPLEEVLNLAQSKNFHDLISNINDIVLELKGSETTFMCEYADETATIVEFLNRWITFSQSIISTLT

SEQ ID NO: 611 - protein, 129 aa, artificial sequence
  synthetic sequence
APASSSTKKTQLQLEHLLLDLQMILNGINNYKNPKLTRMLTFKFYMPKKATELKHLQCLEEELKPLEEVLNLAQSKNFHDLISNINEIVLELKGSETTFMCEYADETATIVEFLNRWITFSQSIISTLT

SEQ ID NO: 612 - protein, 129 aa, artificial sequence
  synthetic sequence
APASSSTKKTQLQLEHLLLDLQMILNGINNYKNPKLTRMLTFKFYMPKKATELKHLQCLEEELKPLEEVLNLAQSKNFHDLISNINNIVLELKGSETTFMCEYADETATIVEFLNRWITFSQSIISTLT

SEQ ID NO: 613 - protein, 129 aa, artificial sequence
  synthetic sequence
APASSSTKKTQLQLEHLLLDLQMILNGINNYKNPKLTRMLTFKFYMPKKATELKHLQCLEEELKPLEEVLNLAQSKNFHDLISNINQIVLELKGSETTFMCEYADETATIVEFLNRWITFSQSIISTLT

SEQ ID NO: 614 - protein, 129 aa, artificial sequence
  synthetic sequence
APASSSTKKTQLQLEHLLLDLQMILNGINNYKNPKLTRMLTFKFYMPKKATELKHLQCLEEELKPLEEVLNLAQSKNFHDLISNINSIVLELKGSETTFMCEYADETATIVEFLNRWITFSQSIISTLT

SEQ ID NO: 615 - protein, 129 aa, artificial sequence
  synthetic sequence
APASSSTKKTQLQLEHLLLDLQMILNGINNYKNPKLTRMLTFKFYMPKKATELKHLQCLEEELKPLEEVLNLAQSKNFHDLISNINHIVLELKGSETTFMCEYADETATIVEFLNRWITFSQSIISTLT

SEQ ID NO: 616 - protein, 129 aa, artificial sequence
  synthetic sequence
APASSSTKKTQLQLEHLLLDLQMILNGINNYKNPKLTRMLTFKFYMPKKATELKHLQCLEEELKPLEEVLNLAQSKNFHDLISNINVEVLELKGSETTFMCEYADETATIVEFLNRWITFSQSIISTLT

SEQ ID NO: 617 - protein, 129 aa, artificial sequence
  synthetic sequence
APASSSTKKTQLQLEHLLLDLQMILNGINNYKNPKLTRMLTFKFYMPKKATELKHLQCLEEELKPLEEVLNLAQSKNFHDLISNINVTVLELKGSETTFMCEYADETATIVEFLNRWITFSQSIISTLT

SEQ ID NO: 618 - protein, 129 aa, artificial sequence
  synthetic sequence
APASSSTKKTQLQLEHLLLDLQMILNGINNYKNPKLTRMLTFKFYMPKKATELKHLQCLEEELKPLEEVLNLAQSKNFHDLISNINVKVLELKGSETTFMCEYADETATIVEFLNRWITFSQSIISTLT

SEQ ID NO: 619 - protein, 129 aa, artificial sequence
  synthetic sequence
APASSSTKKTQLQLEHLLLDLQMILNGINNYKNPKLTRMLTFKFYMPKKATELKHLQCLEEELKPLEEVLNLAQSKNFHDLISNINVRVLELKGSETTFMCEYADETATIVEFLNRWITFSQSIISTLT

SEQ ID NO: 620 - protein, 129 aa, artificial sequence
  synthetic sequence
APASSSTKKTQLQLEHLLLDLQMILNGINNYKNPKLTRMLTFKFYMPKKATELKHLQCLEEELKPLEEVLNLAQSKNFHDLISNINVLVLELKGSETTFMCEYADETATIVEFLNRWITFSQSIISTLT

SEQ ID NO: 621 - protein, 129 aa, artificial sequence
  synthetic sequence
APASSSTKKTQLQLEHLLLDLQMILNGINNYKNPKLTRMLTFKFYMPKKATELKHLQCLEEELKPLEEVLNLAQSKNFHDLISNINVIVLQLKGSETTFMCEYADETATIVEFLNRWITFSQSIISTLT

SEQ ID NO: 622 - protein, 129 aa, artificial sequence
  synthetic sequence
APASSSTKKTQLQLEHLLLDLQMILNGINNYKNPKLTRMLTFKFYMPKKATELKHLQCLEEELKPLEEVLNLAQSKNFHDLISNINVIVLGLKGSETTFMCEYADETATIVEFLNRWITFSQSIISTLT

SEQ ID NO: 623 - protein, 129 aa, artificial sequence
  synthetic sequence
APASSSTKKTQLQLEHLLLDLQMILNGINNYKNPKLTRMLTFKFYMPKKATELKHLQCLEEELKPLEEVLNLAQSKNFHDLISNINVIVLDLKGSETTFMCEYADETATIVEFLNRWITFSQSIISTLT

SEQ ID NO: 624 - protein, 129 aa, artificial sequence
  synthetic sequence
APASSSTKKTQLQLEHLLLDLQMILNGINNYKNPKLTRMLTFKFYMPKKATELKHLQCLEEELKPLEEVLNLAQSKNFHDLISNINVIVLNLKGSETTFMCEYADETATIVEFLNRWITFSQSIISTLT

SEQ ID NO: 625 - protein, 129 aa, artificial sequence
  synthetic sequence
APASSSTKKTQLQLEHLLLDLQMILNGINNYKNPKLTRMLTFKFYMPKKATELKHLQCLEEELKPLEEVLNLAQSKNFHDLISNINVIVLELKGSETTFMCEYADETATIVEFLNRWITFSESIISTLT

SEQ ID NO: 626 - protein, 129 aa, artificial sequence
  synthetic sequence
APASSSTKKTQLQLEHLLLDLQMILNGINNYKNPKLTRMLTFKFYMPKKATELKHLQCLEEELKPLEEVLNLAQSKNFHDLISNINVIVLELKGSETTFMCEYADETATIVEFLNRWITFSDSIISTLT

SEQ ID NO: 627 - protein, 129 aa, artificial sequence
  synthetic sequence
APASSSTKKTQLQLEHLLLDLQMILNGINNYKNPKLTRMLTFKFYMPKKATELKHLQCLEEELKPLEEVLNLAQSKNFHDLISNINVIVLELKGSETTFMCEYADETATIVEFLNRWITFSASIISTLT

SEQ ID NO: 628 - protein, 129 aa, artificial sequence
  synthetic sequence
APASSSTKKTQLQLEHLLLDLQMILNGINNYKNPKLTRMLTFKFYMPKKATELKHLQCLEEELKPLEEVLNLAQSKNFHDLISNINVIVLELKGSETTFMCEYADETATIVEFLNRWITFSSSIISTLT

SEQ ID NO: 629 - protein, 129 aa, artificial sequence
  synthetic sequence
APASSSTKKTQLQLEHLLLDLQMILNGINNYKNPKLTRMLTFKFYMPKKATELKHLQCLEEELKPLEEVLNLAQSKNFHNLISNINVIVLQLKGSETTFMCEYADETATIVEFLNRWITFSQSIISTLT

SEQ ID NO: 630 - protein, 129 aa, artificial sequence
  synthetic sequence
APASSSTKKTQLQLEHLLLDLQMILNGINNYKNPKLTRMLTFKFYMPKKATELKHLQCLEEELKPLEEVLNLAQSKNFHELISNINVIVLQLKGSETTFMCEYADETATIVEFLNRWITFSQSIISTLT

SEQ ID NO: 631 - protein, 129 aa, artificial sequence
  synthetic sequence
APASSSTKKTQLQLEHLLLDLQMILNGINNYKNPKLTRMLTFKFYMPKKATELKHLQCLEEELKPLEEVLNLAQSKNFHTLISNINVIVLQLKGSETTFMCEYADETATIVEFLNRWITFSQSIISTLT

SEQ ID NO: 632 - protein, 129 aa, artificial sequence
  synthetic sequence
APASSSTKKTQLQLEHLLLDLQMILNGINNYKNPKLTRMLTFKFYMPKKATELKHLQCLEEELKPLEEVLNLAQSKNFHQLISNINVIVLQLKGSETTFMCEYADETATIVEFLNRWITFSQSIISTLT

SEQ ID NO: 633 - protein, 129 aa, artificial sequence
  synthetic sequence
APASSSTKKTQLQLETLLLDLQMILNGINNYKNPKLTRMLTFKFYMPKKATELKHLQCLEEELKPLEEVLNLAQSKNFHTLISNINVIVLELKGSETTFMCEYADETATIVEFLNRWITFSQSIISTLT

SEQ ID NO: 634 - protein, 129 aa, artificial sequence
  synthetic sequence
APASSSTKKTQLQLEHLLLDLQMILNGINNYKNPKLTRMLTFKFYMPKKATELKHLQCLEEELKPLEEVLNLAQSKNFHNLISNINIIVLELKGSETTFMCEYADETATIVEFLNRWITFSQSIISTLT

SEQ ID NO: 635 - protein, 129 aa, artificial sequence
  synthetic sequence
APASSSTKKTQLQLEHLLLDLQMILNGINNYKNPKLTRMLTFKFYMPKKATELKHLQCLEEELKPLEEVLNLAQSKNFHTLISNINVIVLELKGSETTFMCEYADETATIVEFLNRWITFSESIISTLT

SEQ ID NO: 636 - protein, 129 aa, artificial sequence
  synthetic sequence
APASSSTKKTQLQLEHLLLDLQMILNGINNYKNPKLTRMLTFKFYMPKKATELKHLQCLEEELKPLEEVLNLAQSKNFHNLISNINVIVLELKGSETTFMCEYADETATIVEFLNRWITFSESIISTLT

SEQ ID NO: 637 - protein, 129 aa, artificial sequence
  synthetic sequence
APASSSTKKTQLQLETLLLDLQMILNGINNYKNPKLTRMLTFKFYMPKKATELKHLQCLEEELKPLEEVLNLAQSKNFHQLISNINVIVLELKGSETTFMCEYADETATIVEFLNRWITFSQSIISTLT

SEQ ID NO: 638 - protein, 129 aa, artificial sequence
  synthetic sequence
APASSSTKKTQLQLETLLLDLQMILNGINNYKNPKLTRMLTFKFYMPKKATELKHLQCLEEELKPLEEVLNLAQSKNFHDLISNINIIVLELKGSETTFMCEYADETATIVEFLNRWITFSQSIISTLT

1. An IL-2 mutant protein, compared to a wild-type IL-2 (preferably a human IL-2, and more preferably an IL-2 comprising a sequence of SEQ ID NO: 1), comprising mutations:
(i) a mutation that changes (e.g., eliminates or reduces) binding affinity for an IL-2Rα receptor, at a binding interface of IL-2 to IL-2Rα, particularly at at least one position selected from positions 35, 37, 38, 41, 42, 43, 45, 61, 68 and 72;
and/or
(ii) a shortened B′C′ loop region (i.e., a sequence linking amino acid residues aa72 and aa84), wherein preferably, the shortened loop region has less than 10, 9, 8, 7, 6 or 5 amino acids in length, and more preferably has 7 amino acids in length; preferably, the shortened B′C′ loop region leads to an improved protein expression yield and/or purity;
and comprising a mutation:
(iii) a mutation that weakens binding to an IL-2Rβγ receptor, at a binding interface of IL-2 to IL-2Rβγ, particularly at at least one position selected from positions 12, 15, 16, 19, 20, 84, 87, 88, 91, 92, 95 and 126;
wherein, the amino acid positions are numbered according to SEQ ID NO: 1;
preferably, the mutant protein comprises the mutations (i) and (iii) or comprises the mutations (ii) and (iii), or comprises the mutations (i), (ii) and (iii);
more preferably, the mutant protein comprises the mutations (ii) and (iii) but does not comprise the mutation (i).

2. The mutant protein according to claim 1, wherein the IL-2Rβγ binding interface mutation (iii) includes a mutation selected from the following:
L12R, L12K, L12E, L12Q, E15Q, E15R, E15A, E15S, H16N, H16T, H16Y, H16A, H16E, H16D, H16R, L19D, L19E, L19R, L19S, D20N, D20Q, D20E, D20A, D20R, D20S, D84N, D84E, D84Q, D84T, D84S, D84R, D84G, D84M, D84F, D84L, D84K, D84H, S87T, S87R, S87K, S87L, S87M, S87H, N88D, N88T, N88Q, N88R, N88E, N88K, N88H, N88M, N88S, N88L, V91I, V91L, V91D, V91E, V91N, V91Q, V91S, V91H, I92E, I92T, I92K, I92R, I92L, E95Q, E95G, E95D, E95N, Q126E, Q126D, Q126A, Q126S, D84N+E95Q, D84E+E95Q, D84T+E95Q, D84Q+E95Q, D84T+H16T, D84N+V91I, D84T+Q126E, D84N+Q126E, H16T+D84Q and H16T+V91I;
preferably, the IL-2Rβγ binding interface mutation (iii) includes a mutation selected from the following:
D20N, D84E, D84N, D84N+E95Q, D84N+Q126E, D84N+V91I, D84Q, D84T, D84T+H16T, D84T+Q126E, E15Q, E95N, E95Q, H16N, H16N+D84N, H16T, H16T+D84Q, H16T+V91I, N88D, N88R, N88Q, N88T, Q126E and V91I;
more preferably, the IL-2Rβγ binding interface mutation (iii) includes
a mutation selected from the following: D84N, E95Q and H16N; or
a mutation selected from the following: D84Q and H16T+V91I; or
a mutation selected from the following: D84T, Q126E, D84N+V91I and D84N+E95Q; or
a mutation selected from the following: N88D, N88R, D20N, D84N, D84N+E95Q, D84T+H16T, D84T+Q126E, D84N+Q126E and H16T+D84Q; or
a mutation selected from the following: D84N and D84N+E95Q;
and still more preferably, the IL-2Rβγ binding interface mutation (iii) includes N88D or D20N or N88R.

3. The mutant protein according to any one of the preceding claims, wherein the mutation (i) includes a combination of mutations K35E+T37E+R38E+F42A, or a combination of mutations K35E+T37E+R38E, or a mutation F42A;
preferably, the mutation (i) includes a combination of mutations K35E+T37E+R38E+F42A.

4. The mutant protein according to any one of the preceding claims, wherein the mutation (ii) includes:
(a) a substitution of aa74 to aa83 in a B′C′ loop region, for example, with a short B′C′ loop sequence from four-helical short-chain cytokine IL family members, such as a B′C′ loop sequence from IL-15, preferably, with a sequence GDASIH; or
(b) a truncation of aa74 to aa83 in a B′C′ loop region, for example, by 1, 2, 3 or 4 amino acids at the C-terminus;
preferably a truncation to form a sequence (Q/G)SKN(F/I)H, and more preferably a truncation to form a sequence selected from the following:
B′C′ loop sequence
QSKNFH
GSKNFH
QSANFH
QSANIH

5. The mutant protein according to any one of the preceding claims, relative to the wild-type IL-2, comprising:
(i) a combination of mutations K35E+T37E+R38E+F42A;
(ii) a B′C′ loop region sequence: AQSKNFH; or AGDASIH or SGDASIH;
(iii) an IL-2Rβγ binding interface mutation, selected from the following:
D20N, D84E, D84N, D84N+E95Q, D84N+Q126E, D84N+V91I, D84Q, D84T, D84T+H16T, D84T+Q126E, E15Q, E95N, E95Q, H16N, H16N+D84N, H16T, H16T+D84Q, H16T+V91I, N88D, N88R, N88Q, N88T, Q126E and V91I;
wherein more preferably, the IL-2Rβγ binding interface mutation:
is selected from D84N, E95Q and H16N; or
is selected from D84T, Q126E, D84N+V91I and D84N+E95Q; or
is selected from N88D, N88R, D20N, D84N+E95Q, D84T+H16T, D84T+Q126E, D84N+Q126E and H16T+D84Q;
and optionally, (iv) a mutation T3A.

6. The mutant protein according to any one of the preceding claims, relative to the wild-type IL-2, maintaining binding to the IL-2Rα receptor and comprising:
(ii) a B′C′ loop region sequence: AQSKNFH; or AGDASIH or SGDASIH, particularly AGDASIH;
(iii) an IL-2Rβγ binding interface mutation, selected from the following:
D20N, D84E, D84N, D84N+E95Q, D84N+Q126E, D84N+V91I, D84Q, D84T, D84T+H16T, D84T+Q126E, E15Q, E95N, E95Q, H16N, H16N+D84N, H16T, H16T+D84Q, H16T+V91I, N88D, N88R, N88Q, N88T, Q126E and V91I;
more preferably, the IL-2Rβγ binding interface mutation is selected from: D20N, N88D and N88R;
and optionally, (iv) a mutation T3A.

7. The mutant protein according to any one of claims 1-6, relative to the wild-type IL-2, further comprising no more than 0-5 amino acid mutations, preferably comprising a mutation C125S or C125A.

8. The mutant protein according to any one of claims 1-7, comprising:
an amino acid sequence having at least 90%, 92%, 93%, 94%, 95%, 96%, 97% or 98% identity to an amino acid sequence selected from SEQ ID NOs: 37-638 (particularly SEQ ID NO: 148 or 197 or SEQ ID NO: 489, 513 or 516); and
an amino acid sequence selected from SEQ ID NOs: 37-638 (particularly SEQ ID NO: 148 or 197 or SEQ ID NO: 489, 513 or 516).

9. The mutant protein according to any one of claims 1-8, compared to the protein before weakening by introducing the mutation (iii), having reduced binding affinity for the IL-2Rβγ receptor,
and having at least one or two properties selected from the following:
maintained binding to IL-2Rα compared to the wild-type IL-2, or
improved expression yield and/or ease of purification to higher purity (e.g. higher purity as measured by SEC-HPLC after one-step affinity chromatography) when expressed in mammalian cells (e.g. 293 cells or CHO cells), e.g. as an Fc fusion protein, compared to the wild-type IL-2.

10. An IL-2 mutant protein fusion protein, comprising the IL2 mutant protein according to any one of claims 1-9.

11. The fusion protein according to claim 10, wherein the IL-2 mutant protein is fused to an Fc antibody fragment (e.g., a human IgG1 Fc),
preferably, the IL-2 mutant protein is fused to an Fc via a linker, wherein the linker is preferably GSGS, and more preferably (G4S)₂;
preferably the Fc fragment comprises mutations that reduce or eliminate binding of Fc to FcγR, e.g., L234A+L235 A;
preferably the Fc fragment has an amino acid sequence having at least 85%, at least 95%, at least 96% or 100% identity to SEQ ID NO: 12.

12. The fusion protein according to claim 11, wherein the Fc fragment comprises a Knob mutation, e.g., mutations T366W and S354C; or the Fc fragment comprises a Hole mutation, e.g., mutations Y349C, T366S, L368A and Y407V.

13. An IL-2-Fc dimer protein, comprising the IL-2 mutant protein fusion protein according to claim 11 or 12, wherein
preferably, the dimer protein, compared to a corresponding dimer protein comprising a wild-type IL-2-Fc fusion protein, has one or more of the following properties:
an increased expression yield and/or purity, when expressed in mammalian cells (e.g., CHO or HEK293 cells);
low toxicity when administered in vivo, for example, as determined by measuring the body weight or change in the body weight of an animal after administration; and
better anti-tumor efficacy.

14. The IL-2-Fc dimer protein according to claim 13, being a homodimer, wherein a first monomer and a second monomer comprise, from N-terminus to C-terminus, i) the IL-2 mutant protein; ii) the linker; and iii) the Fc fragment;
preferably each of the monomers comprises an IL-2 mutant protein selected from SEQ ID NOs: 37-638 linked at the C-terminus to an amino acid sequence of SEQ ID NO: 12 by a linker (G4S)2.

15. The IL-2-Fc dimer protein according to claim 13, being a heterodimer and comprising:
a) a first monomer, comprising, from N-terminus to C-terminus, i) the IL-2 mutant protein; ii) the linker; and iii) a first Fc fragment; and
b) a second monomer, comprising a second Fc fragment and optionally an IgG1 hinge region;
wherein preferably, the first Fc fragment and the second Fc fragment comprise a first heterodimerization mutation and a second heterodimerization mutation that promote the formation of the heterodimer from the first monomer and the second monomer, respectively;
preferably, the first and second heterodimerization mutations comprise a combination of Knob:Hole mutations T366W/S354C:Y349C/T3665/L368A/Y407V;
preferably, the first heterodimerization mutation in the first Fc fragment includes a Knob mutation and the second heterodimerization mutation in the second Fc fragment includes a Hole mutation; alternatively, the first heterodimerization mutation in the first Fc fragment includes a Hole mutation and the second heterodimerization mutation in the second Fc fragment includes a Knob mutation;
preferably, the first monomer comprises an IL-2 mutant protein selected from SEQ ID NOs: 37-638 linked at the C-terminus to an amino acid sequence of SEQ ID NO: 9 by a linker (G4S)2; and the second monomer comprises an amino acid sequence of SEQ ID NO: 10.

16. An immunoconjugate, comprising the IL-2 mutant protein according to any one of claims 1-9 and an antigen-binding molecule, wherein preferably, the antigen-binding molecule is an immunoglobulin molecule, particularly an IgG molecule, or an antibody or an antibody fragment, and more particularly an Fab molecule or an scFv molecule.

17. An isolated polynucleotide, encoding the IL2 mutant protein according to any one of claims 1-9, or the fusion protein according to any one of claims 10-12, or the IL-2-Fc dimer protein according to any one of claims 13-15, or the immunoconjugate according to claim 16.

18. An expression vector, comprising the polynucleotide according to claim 17.

19. A host cell, comprising the polynucleotide according to claim 17 or the vector according to claim 18, wherein preferably, the host cell is a mammalian cell, particularly an HEK293 cell or a CHO cell, or a yeast.

20. A method for producing the IL-2 mutant protein according to any one of claims 1-9, or the fusion protein according to any one of claims 10-12, or the IL-2-Fc dimer protein according to any one of claims 13-15, or the immunoconjugate according to claim 16, comprising culturing the host cell according to claim 19 under conditions suitable for expression of the IL-2 mutant protein or the fusion protein or the IL-2-Fc dimer protein or the immunoconjugate.

21. A pharmaceutical composition, comprising the IL-2 mutant protein according to any one of claims 1-9, or the fusion protein according to any one of claims 10-12, or the IL-2-Fc dimer protein according to any one of claims 13-15, or the immunoconjugate according to claim 16, and a pharmaceutically acceptable carrier.

22. A method for treating a disease in a subject, comprising administering to the subject the IL-2 mutant protein according to any one of claims 1-9, or the fusion protein according to any one of claims 10-12, or the IL-2-Fc dimer protein according to any one of claims 13-15, or the immunoconjugate according to claim 16, or the pharmaceutical composition according to claim 21, wherein preferably the disease is cancer or an autoimmune disease.

23. A method for stimulating the immune system of a subject, comprising administering to the subject an effective amount of the IL-2 mutant protein according to any one of claims 1-9, or the fusion protein according to any one of claims 10-12, or the IL-2-Fc dimer protein according to any one of claims 13-15, or the immunoconjugate according to claim 16, or the pharmaceutical composition according to claim 21.

24. A method for obtaining an IL-2 mutant protein, comprising the following steps:
shortening a sequence of a B′C′ loop region of IL-2 by mutation, and optionally introducing one or more mutations into a binding interface of IL-2 to IL-2Rβγ and/or introducing one or more mutations into a binding interface of IL-2 to IL-2Rα; and
expressing the IL-2 mutant protein in a mammalian cell (e.g., an HEK293 or CHO cell), for example, in the form of an Fc fusion (e.g., an FcLALA fusion);
or comprising the following steps:
introducing one or more mutations into a binding interface of IL-2 to IL-2Rβγ, and optionally shortening a sequence of a B′C′ loop region of IL-2 by mutation and/or introducing one or more mutations into a binding interface of IL-2 to IL-2Rα, preferably not introducing a mutation into the binding interface of IL-2 to IL-2Rα;
and
expressing the IL-2 mutant protein in a mammalian cell (e.g., an HEK293 or CHO cell), for example, in the form of an Fc fusion (e.g., an FcLALA fusion);
wherein preferably, the shortened loop region has less than 10, 9, 8, 7, 6 or 5 amino acids in length, and more preferably has 7 amino acids in length;
more preferably, the B′C′ loop region mutation includes:
(a) a substitution of aa74 to aa83 in the B′C′ loop region, for example, with a short B′C′ loop sequence from four-helical short-chain cytokine IL family members, such as a B′C′ loop sequence from IL-15, preferably, with a sequence including GDASIH; or
(b) a truncation of aa74 to aa83 in the B′C′ loop region, for example, by 1, 2, 3 or 4 amino acids at the C-terminus;
preferably a truncation to form a sequence (Q/G)SKN(F/I)H, and more preferably a truncation to form a sequence selected from the following:
B′C′ loop sequence
QSKNFH
GSKNFH
QSANFH
QSANIH
preferably, the IL-2Rβγ binding interface mutation includes the IL-2Rβγ binding interface mutation described in claim 1 or 2;
preferably, the IL-2Rα binding interface mutation includes the IL-2Rα binding interface mutation described in claim 1 or 3;
preferably, the mutant protein has one of the following improved properties or any combination thereof: (i) improved expression yield and/or protein purity (e.g., purity after one-step affinity chromatography as determined by SEC-HPLC); (ii) weakened binding to IL2Rβ and/or (iii) altered binding to IL-2Rα; preferably has the properties (i) and (ii).

25. A method for engineering a B′C′ loop region of an IL-2 protein, comprising:
(a) substituting aa74 to aa83 in the B′C′ loop region, for example, with a short B′C′ loop sequence from four-helical short-chain cytokine IL family members, such as a B′C′ loop sequence from IL-15, preferably, with a sequence including GDASIH; or
(b) substituting aa73 to aa83 in the B′C′ loop region, for example, with a short B′C′ loop sequence from four-helical short-chain cytokine IL family members, such as a B′C′ loop sequence from IL-15, preferably, with a sequence including AGDASIH; or
(c) truncating aa74 to aa83 in the B′C′ loop region, for example, by 1, 2, 3 or 4 amino acids at the C-terminus;
preferably to form a sequence (Q/G)S(K/A/D)N(F/I)H, and more preferably to form a sequence selected from the following:
B′C′ loop sequence
QSKNFH
GSKNFH
QSANFH
QSANIH
QSANFH
QSDNFH

26. An IL-2 protein, engineered by using the method according to claim 25.
